(19) United States
(12) Patent Application Publication
(10) Pub. No.: US 2004/0265808 A1
(43) Pub. Date: Dec. 30, 2004

(54) Genes involved in osteogenesis, and methods of use

(76) Inventors: Teresa Garcia, Champigny Sur Marne (FR); Sergio Roman Roman, Paris (FR); Roland Baron, Guilforg (FR); Katherine Call, Malden, MA (US); Joachim Theilhaber, Cambridge, MA (US); Timothy Connolly, Westwood, MA (US); Amanda Jackson, Paris (FR); Steven E Bushnell, Medfield, MA (US); Georges Rawadi, Paris (FR)

Correspondence Address: Patricia D Granados, Heller Ehrman White & McAuliffe, Suite 300, 1666 K Street N W, Washington, DC, 20006, US

(21) Appl. No.: 10/473,974

(22) PCT Filed: Apr. 5, 2002
(86) PCT No.: PCT/IB02/02211

Related U.S. Application Data
(60) Provisional application No. 60/281,400, filed on Apr. 5, 2001.

(51) Int. Cl. C12Q 1/68

(52) U.S. Cl. 435/6

(57) ABSTRACT

The present invention relates to methods of diagnosis, therapy, and screening of new therapeutic compounds in the field of osteogenesis, based on the differential expression observed for the genes of the invention, represented by SEQ ID No 1 to SEQ ID No 150, or SEQ ID No 151, 152 or 153, or SEQ ID No 154 to SEQ ID No 196, or SEQ ID No 197 to SEQ ID No 210, or SEQ ID No 211 to SEQ ID No 229, or SEQ ID No 230 to SEQ ID No 234, or SEQ ID No 235 to SEQ ID No 245.

### RELATED APPLICATIONS

[0001] This application relates to the U.S. Provisional Patent Application 60/281,400 filed on Apr. 5, 2001.

### FIELD OF THE INVENTION

[0002] The present invention relates to methods of diagnosis, therapy, and screening of new therapeutic compounds in the field of osteogenesis.

### BACKGROUND OF THE INVENTION

[0003] Osteoporosis is a chronic-degenerative and incapacitating condition of generalized skeletal fragility due to a reduction in the amount of bone and a disruption of skeletal microarchitecture to the point that fracture vulnerability increases. It is a frequent osteometabolic disease, with a high morbidity, frequently associated with hip and vertebral fractures.

[0004] Osteoporosis is actually a syndrome, since there are a lot of conditions that can lead to this state of bone fragility. It is a national health problem due to its high prevalence and incapacitating complications, such as pain and fractures. Its prevention can avoid the large expenditure caused by the treatment of the resulting pathological fractures

[0005] The increase in life expectation, specially in developed countries, is causing a similar increase in the prevalence of osteoporosis. It is an age related process, although estrogen deficit also play a very important role in its pathogenesis.

[0006] It is estimated that 50% of osteoporosis femur fractures expand to total or partial incapacity and that 20% to 30% of individuals suffering from osteoporosis femur fractures show thromboembolic, circulatory or respiratory complications, leading to death in the following two years after the fracture. The most common types of fractures in osteoporosis are vertebral, distal radius (Colle's fracture) and ribs. However, femur fractures are the major cause of morbidity, eventually leading to death.

[0007] Appreciation of the mechanisms through which osteoporosis develops requires an understanding of bone remodeling, that is, a continuous cycle of destruction and renewal carried out by specific cells. Abnormalities in bone reabsorption or formation constitute the final common pathway through which diverse causes, such as dietary or hormonal insufficiency, can produce bone loss.

[0008] Bone turnover is about eight times much faster in the trabecular bone than in cortical one. So, the increase in bone turnover that takes place in the menopausal period will lead to a bone loss especially in sites that are rich in the trabecular bone. This is the reason why vertebral bones are the primary sites of bone loss in osteoporosis.

[0009] Remodeling is initiated by hormonal or physical signals that cause mononuclear marrow-derived precursor cells to cluster on the bone surface, were they fuse into multinucleated osteoblasts. This process is mediated by osteoblasts, which release a number of chemical mediators. These, in turn, stimulate the synthesis of various factors that promote the proliferation of hemopoletic cells. In the cortical bone, osteoblasts fuse to form a “cutting cone” that excavates a reabsorption tunnel to form a Harvesian canal. When the osteoclastic reabsorption is finished, bone formation ensues. Local release of chemical mediators, probably TGFb and IGF1, attract pre-osteoblasts that mature into osteoblasts and replace the missing bone by secreting new collagen and other matrix constituents.

[0010] So, bone turnover can be seen as a process regulated by a macro system (circulating hormones) integrated into a local micro system (local growth factors, cytokines, etc. . . .).

[0011] Reabsorption and formation are complete within eight to twelve weeks, with several additional weeks being required to complete mineralization.

[0012] Under normal conditions, there is an equivalence in the action of osteoblasts and osteoclasts, so that the amount of bone reabsorbed is equal to the amount of bone replaced. However, remodeling, like other biologic processes, in not entirely efficient, so that it may result into an imbalance. The accumulation of bone deficits will be detected only after many years, suggesting that age-related bone loss may be a normal, predictable phenomenon beginning just after cessation of linear growth.

[0013] Given a normal, slightly negative balance, any stimuli that increases the rate of bone remodeling by having more sites involved in this process, will increase the rate of bone loss. This is seen in thyrotoxicosis or primary hyperparathyroidism.

[0014] Other stimuli such as glucocorticoids excess, immobilization, ethanol abuse, smoking and age decrease osteoblastic synthetic activity and thus accelerate bone loss.

[0015] Radiologic signs of osteoporosis such as bone rarefaction and vertebral compression are only present when we have a reduction of 30% or more in bone mass, and thus are not useful if the aim is an early diagnosis.

[0016] There are now several non invasive methods available to access bone mass with reasonable accuracy and precision. The first one to be used for this purpose was the single photon absorptiometry (SPA). This method is only used in skeletal appendages, because it cannot correct the attenuation caused by soft tissues. As the bone mass on these sites does not correspond to the bone mass in critical areas of fractures, such as the vertebral bones, its applicability is limited.

[0017] Several studies made possible the development of another method, called dual photon absorptiometry (DPA), which uses ¹⁵³Gadolineum. This method can correct the contribution of soft tissues and thus made possible the measurement of bone mass in areas of more clinical interest.

[0018] The method used nowadays is the dual energy X-ray absorptiometry (DEXA), in which the ¹⁵³Gadolineum was substituted by the X-ray. The advantages include a greater reproducibility, a lower dose of radiation, and better resolution. It is also a non-invasive and low-cost method. The limitation is that it cannot differ osteoporosis from osteomalacia.

[0019] Osteopenia is defined as a bone density between I-2.5 SD (Standard Deviation) below the mean density of the bone mass peak. Osteoporosis is defined as a bone density below 2.5 SD. Bone density between O—I SD is considered normal. It is recommended a one year interval in serial densitometries in the monitoring of osteoporotic individuals.

[0020] Quantitative computed tomography (QTC) is another method that can be used for the evaluation of bone density, and it separates trabecular trabecular from cortical bone. The high doses of radiation, the high cost and the difficulties to access this method limit its use as a routine test. Ultrasound is another method that has been considered, and it has the advantage of low-cost.

[0021] Aside from other osteometabolic diseases, such as renal osteodistrophy, osteoporosis is characterized by only slight increases in bone turnover; so, the evaluation of osteoporosis requires highly sensitive markers.

[0022] In general, these substances represent either a metabolite of bone matrix breakdown, such as pyridinoline or have an enzymatic activity related to bone formation, such as alkaline phosphatase. It is thought that these markers, along with densitometric studies, would help the identification of women with rapid loss of bone mass, allowing an earlier diagnosis.

[0023] Markers of bone formation include osteocalcin, alkaline phosphatase and type I procollagen extension peptide. All of them are secretory products of osteoblasts during bone matrix synthesis. Of these, the first two are available for clinical use and show correlation with bone formation rate.

[0024] Alkaline phosphatase is the most used marker to estimate bone formation, but it is not specific for the bone as it includes other sites of production, such as the liver and small intestine. In the absence of other conditions that interfere with alkaline phosphatase activity, this marker will indirectly represent bone formation.

[0025] Several studies showed that osteocalcin is a more sensitive marker than total alkaline phosphatase in determining bone formation.

[0026] Markers of bone reabsorption include urinary hydroxiproline and piridinoline, both of which reflect collagen breakdown. Hydroxiproline is an aminoacid essentially unique to collagen and is not catabolized in the body. It is derived from various types of collagen and thus it is not specific of bone tissue. It is neither a sensitive method as it is metabolized in the liver.

[0027] Piridinoline and desoxipiridinoline are specific for bone turnover and are not metabolized in vivo, thus having more specificity and sensitivity than hydroxiproline.

[0028] The simultaneous study of bone reabsorption and formation by these multiple markers has more applicability than the study an unique marker.

[0029] Bone Biopsy studies provide definitive diagnosis of mastocitosis and myeloma and remains the gold standard for excluding osteomalacia. It is an invasive study and should be reserved for patients with unusual, unexplained disorders; for patients in whom myeloma or mastocitosis requires exclusion; for patients in whom osteomalacia is suspected and for patients with post-menopausal osteoporosis who are in serious condition and whose bone turnover markers are inconclusive.

[0030] Estrogen replacement therapy is the single most important way to reduce a woman's risk of osteoporosis during and after menopause. Estrogen replacement therapy is not advised for women having or having had breast cancer or uterine cancer.

[0031] Therefore, there is a need for new bone-building drugs, for example by using the strategy of identifying some drugs that build up bone to where it's stronger and the risk of fracture is no longer present, and others that maintain it by preventing breakdown.

[0032] There is also a need for new method of diagnosis that would be at the same time sensitive, for the early detection of osteoporosis, and specific, to distinguish it from osteopenia.

### SUMMARY OF THE INVENTION

[0033] The present invention relates to methods of diagnosis, therapy, and screening of new therapeutic compounds in the field of osteogenesis, based on the differential expression observed for the genes of the invention, represented by SEQ ID NO 1 to SEQ ID No 150, or SEQ ID No 151, 152 or 153, or SEQ ID No 154 to SEQ ID No 196, or SEQ ID No 197 to SEQ ID No 210, or SEQ ID No 211 to SEQ ID NO 229, or SEQ ID No 230 to SEQ ID No 234, or SEQ ID No 235 to SEQ ID No 245.

### BRIEF DESCRIPTION OF THE FIGURES

[0034] FIGS. 1 to 7 represents the relationship between members of the Wnt-frizzled family, with bone formation, by measurement of alkaline phosphatase (ALP).

[0035] FIG. 8 represents the transcriptional regulation of frizzled receptors 1 and 2 and SFRPs 1, 2 and 4 in the time-course of primary calvaria cells osteoblastic maturation. Murine calvaria cells were obtained from neonatal mice 1-2 days after birth by sequential collagenase digestion). Calvaria cells were cultured until 80% confluence (time 0) and proliferation medium was replaced by differentiation medium (aMEM containing 10% FCS, 2 mM glutamine, 50 mg/ml ascorbic acid and 10 mM b-glycerolphosphate. Total RNAs were extracted at using the RNAplus kit provided by Quantum, harvesting cells from culture days 0, 2, 7, 14, and 21. Changes in relative gene expression were assessed by using GeneChips (Affymetrix). Results are expressed in ratios using the time 0 as denominator, significant changes in expression (pval<0.1 and ratios>1.5×) are indicated with **.

[0036] FIG. 9 represents the transcriptional regulation of Wnt 's, frizzled receptors and SFRPs during maturation of human bone marrow (BMSC) and trabecular bone (NHBC) purified primary cells. BMSC and NHBC cell populations were harvested and dual labelled for STRO-1 and alkaline phosphatase as described (Stewart, K et al, JBMR 11:P 208 (1996) prior to sorting by flow cytometry. Sort regions were the set within each of the quadrants and cells sorted into four population. Cells recovered were re-analyzed by fow cytometry for purity, counted, then pelleted and stored at −80° C. The STRO—I+fraction correspond to less differentiated osteoblast precussors (R5), the STRO-l+/AP+ to more mature osteoblasts (R3) and the AP+ fraction to mature osteoblasts (R2). Total RNAs were extracted at using the RNAplus kit provided by Quantum. Changes in relative gene expression were assessed by using GeneChips (Affynmetrix). Results are expressed in ratios using the time 0 as denominator, significant changes in expression (pval<0.1 and ratios>1.5×) are indicated with **, ratios>1.5 with pval<0.15 are indicated with *.

[0037] FIG. 10 represents the effect of BMP2 on the expression of Gas6 and Ufo/Ax1 in pluripotential mensenchymal cell lines C3H10T1/2 and C2C1/2 cells and the osteoblast-like cells MC3T3-E1 were cultured in the presence or absence of 100 ng of recombinant BMP2 for 4 (4d) or 3 (3d) days. Total RNAs were extracted at using the RNAplus kit provided by Quantum. Changes in relative gene expression were assessed by using GeneChips (Affymetrix). Results are expressed in ratios using the untreated cells values as denominators, significant changes in expression (pval<0.1 and ratios>1.5x) are indicated with **.

[0038] FIG. 11 represents the transcriptional regulation of gas6 and Ufo/Ax1 in the time-course of primary calvaria cells osteoblastic maturation. Murine calvaria cells were obtained from neonatal mice 1-2 days after birth by sequential collagenase digestion and were cultured until 80% confluence (time 0), proliferation medium was replaced by differentiation medium (aMEM containing 10% FCS, 2 mM glutamine, 50 mg/ml ascorbic acid and 10 mM b-glycerolphosphate). Total RNAs were extracted, harvesting cells from culture days 0, 2, 7, 14, and 21. Changes in relative gene expression were assessed by using GeneChips (Affymetrix). Results are expressed in ratios using the time 0 as denominator, significant changes in expression (pval<0.1 and ratios>1.5×) are indicated with **.

[0039] FIG. 12 represents the transcriptional regulation of CCN family and LRP receptors in the time-course of primary calvaria cells osteoblastic maturation. Murine calvaria cells were obtained from neonatal mice 1-2 days after birth by sequential collagenase digestion and were cultured until 80% confluence (time 0), proliferation medium was replaced by differentiation medium (aMEM containing 10% FCS, 2 mM glutamine, 50 mg/ml ascorbic acid and 10 mM b-glycerolphosphate). Total RNAs were extracted, harvesting cells from culture days 0, 2, 7, 14, and 21. Changes in relative gene expression were assessed by using GeneChips (Affymetrix). Results are expressed in ratios using the time 0 as denominator.

### DESCRIPTION OF THE INVENTION

[0040] Therefore the present invention relates to a method of diagnosis of osteoporosis in a patient, which method comprises analyzing gene expression of at least one of SEQ ID No 1 to SEQ ID No 150, or SEQ ID No 151, 152 or 153, or SEQ ID No 154 to SEQ ID No 196, or SEQ ID No 197 to SEQ ID No 210, or SEQ ID NO 211 to SEQ ID No 229, or SEQ ID No 230 to SEQ ID No 234, or SEQ ID No 235 to SEQ ID No 245, in a sample obtained from said patient.

[0041] It is noted that, in this description, the termn “one of SEQ ID No 1 to SEQ ID No 150” is identical to “chosen from the group consisting of SEQ ID No 1, SEQ ID No 2, . . . , SEQ ID No 149, SEQ ID No 150” and that all sequences are thus individually singled out, the chosen writing being made to lighten the description.

[0042] The expression of the genes represented by SEQ ID No 1 to SEQ ID No 150, or SEQ ID No 151, 152 or 153, or SEQ ID No 154 to SEQ ID No 196, or SEQ ID NO 197 to SEQ ID No 210, or SEQ ID No 211 to SEQ ID No 229, or SEQ ID No 230 to SEQ ID No 234, or SEQ ID No 235 to SEQ ID No 245 may be analyzed by various methods known form the person skilled in the art. In a preferred embodiment, said gene expression analysis is performed by the steps of making complementary DNA (cDNA) from messenger RNA (mRNA) in the sample, optionally amplifying portions of the cDNA corresponding to at least one of SEQ ID NO 1 to SEQ ID No 150, or SEQ ID No 151, 152 or 153, or SEQ ID No 154 to SEQ ID No 196, or SEQ ID No 197 to SEQ ID No 210, or SEQ ID No 211 to SEQ ID NO 229, or SEQ ID No 230 to SEQ ID No 234, or SEQ ID No 235 to SEQ ID No 245, and detecting the cDNA optionally amplified, thereby diagnosing osteoporosis.

[0043] It is often advantageous to amplify the cDNA obtained after reverse transcription, as this step gives the possibility to label said cDNA, especially by using labeled (especially radioactive or fluorescent) primers or nucleotides. This also helps in the detection of low represented species of mRNA.

[0044] In one embodiment, such an analysis is performed on one or more genes chosen SEQ ID No 1 to SEQ ID No 150, or SEQ ID No 151, 152 or 153, or SEQ ID NO 154 to SEQ ID No 196, or SEQ ID No 197 to SEQ ID No 210, or SEQ ID No 211 to SEQ ID No 229, or SEQ ID No 230 to SEQ ID No 234, or SEQ ID No 235 to SEQ ID No 245, and the multiplex analysis is preferably performed on a DNA chip, that contains, at its surface, probes that are complementary to the cDNA that has been optionally amplified.

[0045] In one embodiment, the method of the present invention is performed starting from a sample isolated from a patient, that is from a tissue which is a bone, a cartilaginous tissue, or from blood or other body fluid.

[0046] As previously exposed, it is often advantageous, in order to facilitate the detection of the cDNA obtained from the mRNA in the patient sample, to use labeled specific oligonucleotide primer(s) or to use a labeled specific probe. The different labels that may be used are well known to the person skilled in the art, and one can cite ³²P, ³³P, ³⁵S, ³H or ¹²⁵I. Non radioactive labels may be selected from ligants as biotin, avidin, streptavidin, dioxygenin, haptens, dyes, luminescent agents like radioluminescent, chemoluminescent, bioluminescent, fluorescent or phosphorescent agents.

[0047] The amplification of the cDNA obtained from the mRNA may be carried out by different techniques, the preferred one being polymerase chain reaction (PCR). It is also possible to use the ligase chain reaction (LCR), the transcription-based amplification system (TAS), the self-sustained sequence replication system (SSR).

[0048] As previously exposed, it may be advantageous to detect the cDNA with a DNA chip that contains sequences to which said cDNA may hybridize under stringent conditions. In particular, such a method of analysis is well adapted for detecting, at the same time, large number of the genes represented by SEQ ID No 1 to SEQ ID No 150, or SEQ ID No 151, 152 or 153, or SEQ ID No 154 to SEQ ID No 196, or SEQ ID No 197 to SEQ ID No 210, or SEQ ID No 211 to SEQ ID No 229, or SEQ ID No 230 to SEQ ID No 234, or SEQ ID No 235 to SEQ ID No 245.

[0049] Such a DNA chip that harbors at least one probe that hybridizes under stringent conditions with one of SEQ ID No 1 to SEQ ID No 150, or SEQ ID No 151, 152 or 153, or SEQ ID No 154 to SEQ ID No 196, or SEQ ID No 197 to SEQ ID NO 210, or SEQ ID No 211 to SEQ ID No 229, or SEQ ID No 230 to SEQ ID No 234, or SEQ ID No 235 to SEQ ID No 245 is also an object of the present invention.

[0050] It is to be noted that a probe according to the present invention has to be understood accordingly to the art, and represents in particular a nucleic acid that has between about 15 to 150, more preferably about 25 to 100, more preferably about 30 to 75, more preferably about 40 to 60, more preferably about 50 bases.

[0051] Preferably, the DNA chip according to the invention harbors probes that hybridize with at least 5, preferably at least 10, more preferably at least 25, even more preferably at least 30, even more preferably at least 45, even more preferably at least 60 sequences chosen in SEQ ID No 1 to SEQ ID No 196. Preferably the probes hybridize with the human sequences, that are chosen in SEQ ID No 76 to SEQ ID No 196.

[0052] As used herein, the term “hybridizes under stringent conditions” is intended to describe conditions for hybridization and washing under which the nucleotide sequences having at least 60%, 65%, 70%, 75% and preferably 80% or 90%, or 95% or greater identity to each other typically remain hybridized to each other.

[0053] The stringent hybridization conditions may be defined as described in Sambrook et al. ((1989) Molecular cloning: a laboratory manual. 2^{nd} Ed. Cold Spring Harbor Lab., Cold Spring Harbor, N.Y.), with the following conditions: 5× or 6×SCC, 60° C. Highly stringent conditions that can also be used for hybridization are defined with the following conditions: 6×SSC, 65° C.

[0054] Hybridization ADN-ADN or ADN-ARN may be performed in two steps: (1) prehybridization at 42° C. pendant 3 h in phosphate buffer (20 mM, pH 7.5) containing 5 or 6×SSC (1×SSC corresponding to a solution 0.15 M NaCl+0.015 M sodium citrate), 50% formamide, 7% sodium dodecyl sulfate (SDS), 10× Denhardt's, 5% dextran sulfate et 1% salmon sperm DNA; (2) hybridization during up to 20 at a temperature of 60 or 65° C. followed by different washes (about 20 minutes at in 2×SSC+2% SDS, then 0.1×SSC+0.1% SDS). The last wash is performed in 0.1×SSC+0.1% SDS for about 30 minutes at about 60-65° C. this high stringency hybridization conditions may be adapted by a person skilled in the art.

[0055] Another alternative for the analyze of the presence of the cDNAs is to size separate them by electrophoresis prior to detection, and then perform a blotting and autoradiography on the separated cDNA. It is also possible to perform (a) dot blot(s), with (a) specific probe(s), to avoid the step of separation of the cDNAs.

[0056] These methods are preferred in particular for the detection of a low number of cDNAs.

[0057] It is also possible to detect directly the mRNA obtained from cells out of said sample, in particular by carrying out a Northern Blot.

[0058] The inventors of the present application have demonstrated that the genes represented by SEQ ID No 1 to SEQ ID No 150 are differentially expressed in models of osteogenesis, some of them being upregulated, and others down-regulated, upon being put in contact with a stimulator of osteogenesis.

[0059] In a preferred embodiment, one detects genes that are upregulated upon osteogenesis and that are represented by one of SEQ ID No 1 to SEQ ID No 9, SEQ ID No 11 to 20, SEQ ID No 27, SEQ ID No 33 to 36, SEQ ID No 45 to 50, SEQ ID NO 53, SEQ ID No 54, SEQ ID No 58 to 62, SEQ ID No 66, SEQ ID No 69 to 75, SEQ ID No 76 to SEQ ID No 84, SEQ ID No 86 to 95, SEQ ID No 102, SEQ ID No 108 to 111, SEQ ID No 120 to 125, SEQ ID No 128, SEQ ID No 129, SEQ ID No 133 to 137, SEQ ID No 141, SEQ ID No 144 to 150, SEQ ID No 156, SEQ ID No 158 to SEQ ID No 161, SEQ ID No 164 to SEQ ID No 167, SEQ ID No 170 to SEQ ID No 174, SEQ ID No 176, SEQ ID No 177, SEQ ID No 178, SEQ ID No 180 to SEQ ID No 185, SEQ ID No 187, SEQ ID No 191 to SEQ ID No 194, SEQ ID No 196.

[0060] In another embodiment, one detects genes that are downregulated upon osteogenesis and that are represented by one of SEQ ID NO 10, SEQ ID No 21 to 26, SEQ ID No 28 to 32, SEQ ID No 37 to 44, SEQ ID No 51, SEQ ID No 52, SEQ ID No 55 to 57, SEQ ID No 63 to 65, SEQ ID No 67, SEQ ID No 68, SEQ ID No 85, SEQ ID No 96 to 101, SEQ ID No 103 to 107, SEQ ID No 112 to 119, SEQ ID No 126, SEQ ID No 127, SEQ ID No 130 to 132, SEQ ID No 138 to 140, SEQ ID No 142, SEQ ID No 143, SEQ ID No 154, SEQ ID No 155, SEQ ID No 157, SEQ ID No 162, SEQ ID No 163, SEQ ID No 168, SEQ ID No 196, SEQ ID No 175, SEQ ID No 176, SEQ ID No 179, SEQ ID No 186, SEQ ID No 188, SEQ ID No 189, SEQ ID No 190, SEQ ID No 195.

[0061] In yet another embodiment, the present invention relates to a nucleic acid molecule that hybridizes under stringent conditions to one or more of the nucleic acid sequences (SEQ ID No 1 to SEQ ID No 150, or SEQ ID No 151, 152 or 153, or SEQ ID No 154 to SEQ ID No 196, or SEQ ID No 197 to SEQ ID No 210, or SEQ ID No 211 to SEQ ID No 229, or SEQ ID No 230 to SEQ ID No 234, or SEQ ID No 235 to SEQ ID No 245) noted above that are either upregulated or down-regulated during osteogenesis.

[0062] In order to diagnose osteoporosis, it is therefore interesting to detect variations in the expression level of said genes in tissues of a patient.

[0063] Therefore the present invention relates to another method of diagnosis of osteoporosis in a mammal comprising the steps of:

[0064] a) contacting a sample of mammalian bone or cartilaginous tissue with an agent for specifically detecting endogenous expression of one of SEQ ID NO 1 to SEQ ID No 150, or SEQ ID No 151, 152 or 153, or SEQ ID No 154 to SEQ ID No 196, or SEQ ID No 197 to SEQ ID No 210, or SEQ ID No 211 to SEQ ID No 229, or SEQ ID No 230 to SEQ ID No 234, or SEQ ID No 235 to SEQ ID No 245 in said tissue,

[0065] b) detecting a level of endogenous expression of said gene in said tissue; and

[0066] c) comparing said level of endogenously expressed gene represented by one of SEQ ID No 1 to SEQ ID No 150, or SEQ ID No 151, 152 or 153, or SEQ ID No 154 to SEQ ID No 196, or SEQ ID No 197 to SEQ ID No 210, or SEQ ID No 211 to SEQ ID No 229, or SEQ ID No 23.0 to SEQ ID No 234, or SEQ ID No 235 to SEQ ID No 245 in said tissue with a reference level of said gene represented by one of SEQ ID No 1 to SEQ ID NO 150, or SEQ ID No 151, 152 or 153, or SEQ ID No 154 to SEQ ID NO 196, or SEQ ID No 197 to SEQ ID No 210, or SEQ ID No 211 to SEQ ID No 229, or SEQ ID No 230 to SEQ ID No 234, or SEQ ID No 235 to SEQ ID No 245 endogenously expressed in undiseased mammalian bone or cartilaginous tissue to diagnose osteoporosis in said mammal.

[0067] In one embodiment, said agent used for the specific detection of endogenous expression of said gene is a nucleic acid probe that hybridizes specifically with RNA transcribed from said gene chosen from SEQ ID No 1 to SEQ ID No 150, or SEQ ID No 151, 152 or 153, or SEQ ID No 154 to SEQ ID No 196, or SEQ ID No 197 to SEQ ID No 210, or SEQ ID No 211 to SEQ ID No 229, or SEQ ID No 230 to SEQ ID No 234, or SEQ ID No 235 to SEQ ID No 245 present in cells of said tissue, or cDNA obtainable from said RNA.

[0068] In another embodiment, said agent is a monoclonal or polyclonal antibody that specifically recognizes the protein or peptide sequence coded by said gene chosen from SEQ ID No 1 to SEQ ID No 150, or SEQ ID No 151, 152 or 153, or SEQ ID No 154 to SEQ ID No 196, or SEQ ID No 197 to SEQ ID No 210, or SEQ ID No 211 to SEQ ID No 229, or SEQ ID No 230 to SEQ ID No 234, or SEQ ID No 235 to SEQ ID No 245, or by a gene chosen from the genes hybridizing under stringent conditions to one of SEQ ID No 1 to SEQ ID No 150, or SEQ ID No 151, 152 or 153, or SEQ ID No 154 to SEQ ID No 196, or SEQ ID No 197 to SEQ ID No 210, or SEQ ID No 211 to SEQ ID No 229, or SEQ ID No 230 to SEQ ID No 234, or SEQ ID No 235 to SEQ ID No 245.

[0069] In order to obtain an accurate result when determining the differential expression of one of SEQ ID No 1 to SEQ ID No 150, or SEQ ID No 151, 152 or 153, or SEQ ID No 154 to SEQ ID No 196, or SEQ ID No 197 to SEQ ID No 210, or SEQ ID No 211 to SEQ ID No 229, or SEQ ID No 230 to SEQ ID No 234, or SEQ ID No 235 to SEQ ID No 245, it may be useful to use an internal standard, and to complete the above-developed method of the invention with the following additional steps of:

[0070] d) contacting a sample of said mammalian bone or cartilaginous tissue with a control nucleic acid probe that hybridizes specifically with RNA transcribed from a gene expressed uniformly in mammalian tissues;

[0071] e) detecting a level of expression of said gene in said tissue; and

[0072] f) comparing the relative expression levels of said gene represented by one of SEQ ID No 1 to SEQ ID No 150, or SEQ ID No 151, 152 or 153, or SEQ ID No 154 to SEQ ID No 196, or SEQ ID No 197 to SEQ ID No 210, or SEQ ID No 211 to SEQ ID No 229, or SEQ ID No 230 to SEQ ID NO 234, or SEQ ID No 235 to SEQ ID No 245 and said gene in said tissue, with the relative expression levels of said gene represented by one of SEQ ID No 1 to SEQ ID No 150, or SEQ ID No 151, 152 or 153, or SEQ ID No 154 to SEQ ID No 196, or SEQ ID No 197 to SEQ ID No 210, or SEQ ID No 211 to SEQ ID No 229, or SEQ ID No 230 to SEQ ID No 234, or SEQ ID No 235 to SEQ ID No 245 and said gene in undamaged or undiseased mammalian bone or cartilaginous tissue.

[0073] Indeed, it is essential to ensure that about the same quantity of starting material is used for the comparison between the test sample and the standard (undiseased) sample. The analysis of the quantity of mRNA from a gene that is uniformly expressed will respond to this concern. This will allow to reduce the variability and uncertainty obtained when performing the quantitative analysis of differential expression of the genes disclosed in the invention.

[0074] In one embodiment, said gene expressed uniformly in mammalian tissues is actin. The present invention discloses the sequences of genes that are shown to be differentially expressed in the phenomenon of osteogenesis. Some of the genes are over-expressed while others are under-expressed during this complex process.

[0075] Using this data, the present invention relates to a method method for promoting osteogenesis and/or preventing osteoporosis comprising administering to a subject a therapeutically effective amount of a protein product coded by one of SEQ ID No 1 to SEQ ID No 150, or SEQ ID No 151, 152 or 153, or SEQ ID No 154 to SEQ ID No 196, or SEQ ID No 197 to SEQ ID No 210, or SEQ ID No 211 to SEQ ID No 229, or SEQ ID No 230 to SEQ ID No 234, or SEQ ID No 235 to SEQ ID No 245, wherein said protein product promotes osteogenesis and/or prevents osteoporosis.

[0076] In a preferred embodiment, said protein is a secreted protein, and is coded by one of SEQ ID No 1 to 26, SEQ ID No 71, SEQ ID No 76 to SEQ ID No 101, SEQ ID No 154 to SEQ ID No 166.

[0077] In another preferred embodiment, said protein is a membrane associated enzyme, and is coded by one of SEQ ID No 27 to 30, 102 to 105, SEQ ID No 167, SEQ ID No 168 or SEQ ID No 169.

[0078] In another preferred embodiment, said protein is a membrane associated/putative receptor, and is coded by one of SEQ ID No 31 to 44, 74, 106 to 119, and 149, SEQ ID No 152, SEQ ID No 170 to SEQ ID No 174.

[0079] In another preferred embodiment, said protein is a receptor GPCR, an ion channel or a transporter, and is coded by one of SEQ ID No 45 to 52, 120 to 127, SEQ ID No 175 to SEQ ID No 181.

[0080] In another preferred embodiment, said protein is an intracellular enzyme and is coded by one of SEQ ID No 53 to 57, 128 to 132, SEQ ID No 182, SEQ ID No 183 or SEQ ID No 184.

[0081] In another preferred embodiment, said protein is a transcription factor or an orphan nuclear receptor and is coded by one of SEQ ID No 58 to 64, 69, 133 to 139, 144, SEQ ID No 151, SEQ ID No 185 to SEQ ID No 192.

[0082] In another preferred embodiment, said protein is involved in intracellular signal transduction and is coded by one of SEQ ID No 65 to 68, and 140 to 143, SEQ ID No 153, SEQ ID No 193 to SEQ ID No 196.

[0083] In another preferred embodiment, said protein is coded by one of SEQ ID No 70, 72, 73, 75, 145, 146, 147, 148, and 150.

[0084] In another preferred embodiment, said protein is part of the Wnt-frizzled family, and is preferably coded by one of SEQ ID No 197 to SEQ ID No 210.

[0085] In another preferred embodiment, said protein is part of the Ephin-ephrin family and is preferably coded by one of SEQ ID No 211 to SEQ ID No 229.

[0086] In another preferred embodiment, said protein is part of the Tyro3 family and is preferably coded by one of SEQ ID No 230 to SEQ ID No 234.

[0087] In another preferred embodiment, said protein is part of the CCN family and is preferably coded by one of SEQ ID No 235 to SEQ ID No 245.

[0088] In another preferred embodiment, the expression of said protein is upregulated upon osteogenesis.

[0089] In another embodiment, the expression of said protein is down-regulated upon osteogenesis. The invention also relates to a method for promoting osteogenesis and/or preventing osteoporosis comprising administering to a subject a therapeutically effective amount of a nucleic acid comprising one of SEQ ID No 1 to SEQ ID No 150, or SEQ ID No 151, 152 or 153, or SEQ ID No 154 to SEQ ID No 196, or SEQ ID No 197 to SEQ ID No 210, or SEQ ID No 211 to SEQ ID No 229, or SEQ ID No 230 to SEQ ID No 234, or SEQ ID No 235 to SEQ ID No 245, wherein said nucleic acid product promotes osteogenesis and/or prevents osteoporosis.

[0090] In a preferred embodiment, said nucleic acid codes for a secreted protein, and is one of SEQ ID No 1 to 26, SEQ ID No 71, SEQ ID No 76 to SEQ ID No 101, SEQ ID No 154 to SEQ ID No 166.

[0091] In another preferred embodiment, said nucleic acid codes for a membrane associated enzyme, and is one of SEQ ID No 27 to 30, 102 to 105, SEQ ID No 167, SEQ ID No 168 or SEQ ID No 169.

[0092] In another preferred embodiment, said nucleic acid codes for a membrane associated/putative receptor, and is one of SEQ ID No 31 to 44, 74, 106 to 119, and 149, SEQ ID No 152, SEQ ID No 170 to SEQ ID No 174.

[0093] In another preferred embodiment, said nucleic acid codes for a receptor GPCR, an ion channel or a transporter, and is one of SEQ ID No 45 to 52, 120 to 127, SEQ ID No 175 to SEQ ID No 181.

[0094] In another preferred embodiment, said nucleic acid codes for an intracellular enzyme and is one of SEQ ID No 53 to 57, 128 to 132, SEQ ID No 182, SEQ ID No 183 or SEQ ID No 184.

[0095] In another preferred embodiment, said nucleic acid codes for a transcription factor or an orphan nuclear receptor and is one of SEQ ID No 58 to 64, 69, 133 to 139, 144, SEQ ID No 151, SEQ ID NO 185 to SEQ ID No 192.

[0096] In another preferred embodiment, said nucleic acid codes for a protein involved in intracellular signal transduction and is one of SEQ ID No 65 to 68, and 140 to 143, SEQ ID No 153, SEQ ID No 193 to SEQ ID No 196.

[0097] In another preferred embodiment, said nucleic acid is one of SEQ ID No 70, 72, 73, 75, 145, 146, 147, 148, and 150.

[0098] In another preferred embodiment, said acid nucleic codes for a protein that is part of the Wnt-frizzled family, and is preferably one of SEQ ID No 197 to SEQ ID No 210.

[0099] In another preferred embodiment, said acid nucleic codes for a protein that is part of the Ephin-ephrin family and is preferably one of SEQ ID No 211 to SEQ ID No 229.

[0100] In another preferred embodiment, said acid nucleic codes for a protein that is part of the Tyro3 family and is preferably one of SEQ ID No 230 to SEQ ID No 234.

[0101] In another preferred embodiment, said acid nucleic codes for a protein that is part of the CCN family and is preferably one of SEQ ID No 235 to SEQ ID No 245.

[0102] In another preferred embodiment, the expression of said nucleic acid is upregulated upon osteogenesis.

[0103] In another embodiment, the expression of said nucleic acid is down-regulated upon osteogenesis.

[0104] In a preferred embodiment, said nucleic acid is administered to said subject such as to enter osteoblastic or osteoclastic cells, that is the cells that are play an important part in osteogenesis and bone remodelling.

[0105] For penetration of the nucleic acid within the cells, different means may be used by the person skilled in the art. In particular, it is possible to introduce said nucleic acid within the cells by means of a viral vector.

[0106] Said virus may be of human or of non-human origin, as long as it possesses the capability to infect the cells of the patient. In particular, said virus is chosen from the group consisting of adenoviridiae, retroviridiae (oncovirinae such as RSV, spumavirinae, lentivirus), poxyiridiae, herpesviridiae (HSV, EBV, CMV . . . ), iridiovirus, hepadnavirus (hepatitis B virus), papoviridiae (SV40, papillomavirus), parvoviridiae (adeno-associated virus . . . ), reoviridiae (reovirus, rotavirus), togaviridiae (arbovirus, alphavirus, flavivirus, rubivirus, pestivirus), coronaviriadiae, paramyxoviridae, orthomixoviridae, rhabdoviridae (rabies virus), bunyaviridae, arenaviridae, picomaviridae (enterovirus, Coxsackievirus, echovirus, rhinovirus, aphtovirus, cardiovirus, hepatitis A virus . . . ), Modified Virus Ankara, and derived viruses thereof.

[0107] By derived viruses, it is intended to mean that the virus possesses modifications that adapt it to the human being (if it is a virus from a non-human origin that could not infect human cells without said modifications), and/or that reduce its potential or actual pathogenicity. In particular, it is best if the virus used for the gene transfer is defective for replication within the human body. This is an important safety concern, as the control of the expression of the functional gene may be a concern for the implementation of the method of the invention. One does not either whish to have a dissemination to other cells or to other people of the viral vector carrying the gene of therapeutic interest.

[0108] This is why the viral vector used in the method of the invention is preferably deficient for replication, and would therefore be prepared with the help of a auxiliary virus or in a complementary cell line, that would bring in trans the genetic material needed for the preparation of a sufficient viral titer.

[0109] Such defective viruses and appropriate cell lines are described in the art, for example in U.S. Pat. No. 6,133,028 that describes deficient adeno-associated viruses (AAV) and the associated complementation cell lines, and the content of which is herein incorporated by reference. Other suitable viruses are described for example in WO 00/34497. For adenoviruses or AAV, it may be interesting to delete the E1 and/or E4 regions.

[0110] For the MFG virus described below, one can use the complementation T-CRIP cell line that was described in Hacein-Bey et al. (1996, Blood. 87, 3108-16), incorporated herein by reference. Other appropriate cell lines could also be used. In order to improve the long lasting effect of the correction, one would prefer a virus that allows the integration of said functional gene into a chromosome of the infected cells.

[0111] In particular, one would chose adenoviruses, some of which defective for replication are well know by the person skilled in the art, or retroviruses, in particular murine derived retroviruses. Among the retroviruses that can be used, one would prefer a myeloproliferative sarcoma virus (MPSV)-based vector as described in Bunting et al. (1998, Nature Medecine, 4, 58-64, the content of which is incorporated herein by reference). Another well suited retrovirus that can be used for the implementation of the method of the invention is the MFG vector, derived from the MLV virus (Moloney retrovirus), described in Hacein-Bey et al. (1996, Blood. 87, 3108-16) or Cavazzana-Calvo et al. (2000, Science, 288, 669-72), the content of both these documents being incorporated herein by reference.

[0112] The choice of the virus to be used for the implementation of the method of the invention will be function of the characteristics of said virus and of the complementation cell line. It is clear that different viruses have different properties (in particular LTR in retroviruses), and that the viruses and cell lines cited above are only examples of means that can be used for the implementation of the method of the invention, and that they shall not be considered as restrictive. The person skilled in the art knows how to choose the best combination gene—virus—cell line and/or auxiliary virus for any given situation.

[0113] In another embodiment, said nucleic acid is introduced within cells by means of a synthetic vector which can be chosen from the group consisting of a cationic amphiphile, a cationic lipid, a cationic or neutral polymer, a protic polar compound such as propylene glycol, polyethylene glycol, glycerol, ethano, I-methyl-L-2-pyrrolidone or their derivatives, and an aprotic polar compound such as dimethyl sulfoxide (DMSO), diethyl sulfoxide, di-n-propyl sulfoxide, dimethyl sulfone, sulfolane, dimethylformamide, dimethylacetamide, tetramethylurea, acetonitrile or their derivatives. The person skilled in the art is aware of synthetic vectors that can be used and allow a high level of transfection, such as Lifofectine and Lipofectamine reagents available from Life Technologies (Bethesda, Md.).

[0114] The present invention also relates to a method for promoting osteogenesis and/or preventing osteoporosis comprising administering to a subject a therapeutically effective amount of an inhibitor of a protein product coded by one of SEQ ID No 1 to SEQ ID No 150, or SEQ ID No 151, 152 or 153, or SEQ ID NO 154 to SEQ ID No 196, or SEQ ID No 197 to SEQ ID No 210, or SEQ ID No 211 to SEQ ID No 229, or SEQ ID No 230 to SEQ ID No 234, or SEQ ID No 235 to SEQ ID NO 245, wherein said inhibitor of said protein product promotes osteogenesis and/or prevents osteoporosis.

[0115] In one embodiment, said inhibitor is a monoclonal or polyclonal antibody directed towards said protein product coded by one of SEQ ID No 1 to SEQ ID No 150, or SEQ ID No 151, 152 or 153, or SEQ ID No 154 to SEQ ID No 196, or SEQ IDN 1197 to SEQ ID No 210, or SEQ ID No 211 to SEQ ID No 229, or SEQ ID No 230 to SEQ ID No 234, or SEQ ID No 235 to SEQ ID No 245.

[0116] In a preferred embodiment, said protein is a secreted protein, and is coded by one of SEQ ID No 1 to 26, SEQ ID No 71, SEQ ID No 76 to SEQ ID No 101, SEQ ID No 154 to SEQ ID No 166.

[0117] In another preferred embodiment, said protein is a membrane associated enzyme, and is coded by one of SEQ ID No 27 to 30, 102 to 105, SEQ ID No 167, SEQ ID No 168 or SEQ ID No 169.

[0118] In another preferred embodiment, said protein is a membrane associated/putative receptor, and is coded by one of SEQ ID No 31 to 44, 74, 106 to 119, and 149, SEQ ID No 152, SEQ ID No 170 to SEQ ID No 174.

[0119] In another preferred embodiment, said protein is a receptor GPCR, an ion channel or a transporter, and is coded by one of SEQ ID No 45 to 52, 120 to 127, SEQ ID No 175 to SEQ ID No 181.

[0120] In another preferred embodiment, said protein is an intracellular enzyme and is coded by one of SEQ ID No 53 to 57, 128 to 132, SEQ ID No 182, SEQ ID No 183 or SEQ ID No 184.

[0121] In another preferred embodiment, said protein is a transcription factor or an orphan nuclear receptor and is coded by one of SEQ ID No 58 to 64, 69, 133 to 139, 144, SEQ ID No 151, SEQ ID No 185 to SEQ ID No 192.

[0122] In another preferred embodiment, said protein is involved in intracellular signal transduction and is coded by one of SEQ ID No 65 to 68, and 140 to 143, SEQ ID No 153, SEQ ID No 193 to SEQ ID No 196. In another preferred embodiment, said protein is part of the Wnt-frizzled family, and is preferably coded by one of SEQ ID No 197 to SEQ ID No 210.

[0123] In another preferred embodiment, said protein is part of the Ephin-ephrin family and is preferably coded by one of SEQ ID No 211 to SEQ ID No 229.

[0124] In another preferred embodiment, said protein is part of the Tyro3 family and is preferably coded by one of SEQ ID No 230 to SEQ ID No 234.

[0125] In another preferred embodiment, said protein is part of the CCN family and is preferably coded by one of SEQ ID No 235 to SEQ ID No 245.

[0126] In another preferred embodiment, said protein is coded by one of SEQ ID NO 70, 72, 73, 75, 145, 146, 147, 148, and 150.

[0127] In another preferred embodiment, the expression of said protein is upregulated upon osteogenesis.

[0128] In another embodiment, the expression of said protein is down-regulated upon osteogenesis.

[0129] In another embodiment, said inhibitor is a ribozyme that leads to degradation of the mRNA corresponding to an nucleic acid represented by one of SEQ ID No 1 to SEQ ID No 150, or SEQ ID No 151, 152 or 153, or SEQ ID No 154 to SEQ ID No 196, or SEQ ID No 197 to SEQ ID No 210, or SEQ ID No 211 to SEQ ID No 229, or SEQ ID No 230 to SEQ ID No 234, or SEQ ID No 235 to SEQ ID No 245.

[0130] In another embodiment, said inhibitor is a nucleic acid, antisense to the nucleic acid represented by one of SEQ ID No 1 to SEQ ID No 150, or SEQ ID No 151, 152 or 153, or SEQ ID No 154 to SEQ ID No 196, or SEQ ID No 197 to SEQ ID No 210, or SEQ ID No 211 to SEQ ID No 229, or SEQ ID No 230 to SEQ ID No 234, or SEQ ID No 235 to SEQ ID No 245.

[0131] Such a nucleic acid may be a deoxyribonucleotide or ribonucleotide polymer in single-stranded form, and encompasses known analogues of natural nucleotides that hybridize to nucleic acids in a manner similar to naturally occurring nucleotides. Known and preferred analogues include polymers of nucleotides with phosphorothioate or methylphosphonate liaisons, or peptide nucleic acids.

[0132] In a preferred embodiment, said nucleic acid target of the inhibitor codes for a secreted protein, and is one of SEQ ID No 1 to 26, SEQ ID No 71, SEQ ID No 76 to SEQ ID No 101, SEQ ID No 154 to SEQ ID No 166.

[0133] In another preferred embodiment, said nucleic acid target of the inhibitor codes for a membrane associated enzyme, and is one of SEQ ID No 27 to 30, 102 to 105, SEQ ID No 167, SEQ ID No 168 or SEQ ID No 169.

[0134] In another preferred embodiment, said nucleic acid target of the inhibitor codes for a membrane associated/putative receptor, and is one of SEQ ID No 31 to 44, 74, 106 to 119, and 149, SEQ ID No 152, SEQ ID No 170 to SEQ ID No 174.

[0135] In another preferred embodiment, said nucleic acid target of the inhibitor codes for a receptor GPCR, an ion channel or a transporter, and is one of SEQ ID No 45 to 52, 120 to 127, SEQ ID No 175 to SEQ ID No 181.

[0136] In another preferred embodiment, said nucleic acid target of the inhibitor codes for an intracellular enzyme and is one of SEQ ID No 53 to 57, 128 to 132, SEQ ID No 182, SEQ ID No 183 or SEQ ID No 184.

[0137] In another preferred embodiment, said nucleic acid target of the inhibitor codes for a transcription factor or an orphan nuclear receptor and is one of SEQ ID NO 58 to 64, 69, 133 to 139, 144, SEQ ID No 151, SEQ ID No 185 to SEQ ID No 192.

[0138] In another preferred embodiment, said nucleic acid target of the inhibitor codes for a protein involved in intracellular signal transduction and is one of SEQ ID NO 65 to 68, and 140 to 143, SEQ ID No 153, SEQ ID No 193 to SEQ ID No 196.

[0139] In another preferred embodiment, said acid nucleic target of the inhibitor codes for a protein that is part of the Wnt-frizzled family, and is preferably one of SEQ ID No 197 to SEQ ID No 210.

[0140] In another preferred embodiment, said acid nucleic target of the inhibitor codes for a protein that is part of the Ephin-ephrin family and is preferably one of SEQ ID No 211 to SEQ ID No 229.

[0141] In another preferred embodiment, said acid nucleic target of the inhibitor codes for a protein that is part of the Tyro3 family and is preferably one of SEQ ID No 230 to SEQ ID No 234.

[0142] In another preferred embodiment, said acid nucleic target of the inhibitor codes for a protein that is part of the CCN family and is preferably one of SEQ ID NO 235 to SEQ ID No 245.

[0143] In another preferred embodiment, said nucleic acid target of the inhibitor is In another preferred embodiment, said protein is coded by one of SEQ ID No 70, 72, 73, 75, 145, 146, 147, 148, and 150.

[0144] In another preferred embodiment, the expression of said nucleic acid target of said inhibitor is upregulated upon osteogenesis.

[0145] In another embodiment, the expression of said nucleic acid target of said inhibitor is downregulated upon osteogenesis.

[0146] Said nucleic acid that is a inhibitor of the nucleic acid chosen from at least one of SEQ ID No 1 to SEQ ID No 150, or SEQ ID No 151, 152 or 153, or SEQ ID NO 154 to SEQ ID No 196, or SEQ ID No 197 to SEQ ID No 210, or SEQ ID No 211 to SEQ ID No 229, or SEQ ID No 230 to SEQ ID No 234, or SEQ ID No 235 to SEQ ID No 245 may be introduced in the same kind of cells, using the same vectors as already described above.

[0147] The present invention also relates to the use of

[0148] a protein product coded by one of SEQ ID No 1 to SEQ ID No 150, or SEQ ID No 151, 152 or 153, or SEQ ID No 154 to SEQ ID NO 196, or SEQ ID No 197 to SEQ ID No 210, or SEQ ID No 211 to SEQ ID No 229, or SEQ ID No 230 to SEQ ID No 234, or SEQ ID No 235 to SEQ ID No 245, wherein said protein product promotes osteogenesis and/or prevents osteoporosis,

[0149] a nucleic acid comprising one of SEQ ID No 1 to SEQ ID No 150, or SEQ ID No 151, 152 or 153, or SEQ ID No 154 to SEQ ID No 196, or SEQ ID No 197 to SEQ ID No 210, or SEQ ID No 211 to SEQ ID No 229, or SEQ ID No 230 to SEQ ID No 234, or SEQ ID No 235 to SEQ ID No 245, wherein said nucleic acid product promotes osteogenesis and/or prevents osteoporosis

[0150] an inhibitor of a protein product coded by one of SEQ ID No 1 to SEQ ID No 150, or SEQ ID No 151, 152 or 153, or SEQ ID No 154 to SEQ ID No 196, or SEQ ID No 197 to SEQ ID No 210, or SEQ ID No 211 to SEQ ID No 229, or SEQ ID No 230 to SEQ ID No 234, or SEQ ID No 235 to SEQ ID No 245, wherein said inhibitor of said protein product promotes osteogenesis and/or prevents osteoporosis

[0151] for the preparation of a medicament intended for the treatment of osteoporosis and/or the promotion of osteogenesis.

[0152] The present invention thus relates to a method of therapy and/or prevention of osteoporosis, based on the nucleic acid sequences and/or protein products identified by the inventors of this application as being up or down-regulated in osteogenesis. An other aspect of the invention relates to the use of these sequences and proteins in methods of detection, identification, and/or screening of new compounds useful for the treatment of bone diseases, especially the treatment and/or prevention of osteoporosis, and for osteogenesis.

[0153] Thus, the present invention relates to a method for detecting, identifying and/or screening a compound having a role in osteogenesis, comprising the steps of:

[0154] a) bringing said compound in contact with a cell model of osteogenesis, and

[0155] b) comparing the level of expression of one of SEQ ID No 1 to SEQ ID NO 150, or SEQ ID No 151, 152 or 153, or SEQ ID No 154 to SEQ ID No 196, or SEQ ID No 197 to SEQ ID No 210, or SEQ ID NO 211 to SEQ ID No 229, or SEQ ID No 230 to SEQ ID No 234, or SEQ ID No 235 to SEQ ID No 245 in said cell model with regard to said level of expression of said gene in the same model to which said compound has not been brought in contact,

[0156] the role of said compound in osteogenesis being deduced from the presence of a difference between said levels of expression between the two systems.

[0157] In another aspect, the invention relates to a method for detecting, identifying and/or screening a compound useful for modulation of osteogenesis, comprising the steps of:

[0158] a) bringing said compound in contact with a protein coded by one of SEQ ID No 1 to SEQ ID No 150, or SEQ ID No 151, 152 or 153, or SEQ ID No 154 to SEQ ID No 196, or SEQ ID No 197 to SEQ ID No 210, or SEQ ID No 211 to SEQ ID No 229, or SEQ ID No 230 to SEQ ID No 234, or SEQ ID No 235 to SEQ ID No 245, and

[0159] b) analyzing the interaction between said compound and said protein, the utility of said compound in the modulation of osteogenesis being deduced from the presence of an interaction between said compound and said protein coded by one of SEQ ID No 1 to SEQ ID No 150, or SEQ ID No 151, 152 or 153, or SEQ ID No 154 to SEQ ID No 196, or SEQ ID No 197 to SEQ ID No 210, or SEQ ID No 211 to SEQ ID No 229, or SEQ ID No 230 to SEQ ID No 234, or SEQ ID No 235 to SEQ ID No 245.

[0160] In a preferred embodiment, one detects genes that are upregulated upon osteogenesis and that are represented by one of SEQ ID No 1 to SEQ ID No 9, SEQ ID NO Il to 20, SEQ ID No 27, SEQ ID No 33 to 36, SEQ ID No 45 to 50, SEQ ID No 53, SEQ ID No 54, SEQ ID No 58 to 62, SEQ ID No 66, SEQ ID No 69 to 75, SEQ ID No 76 to SEQ ID No 84, SEQ ID No 86 to 95, SEQ ID No 102, SEQ ID No 108 to 111, SEQ ID No 120 to 125, SEQ ID No 128, SEQ ID No 129, SEQ ID No 133 to 137, SEQ ID No 141, SEQ ID No 144 to 150, SEQ ID No 156, SEQ ID No 158 to SEQ ID No 161, SEQ ID No 164 to SEQ ID No 167, SEQ ID No 170 to SEQ ID No 174, SEQ ID No 176, SEQ ID No 177, SEQ ID No 178, SEQ ID No 180 to SEQ ID No 185, SEQ ID No 187, SEQ ID No 191 to SEQ ID No 194, SEQ ID No 196.

[0161] In another embodiment, one detects genes that are downregulated upon osteogenesis and that are represented by one of SEQ ID No 10, SEQ ID No 21 to 26, SEQ ID No 28 to 32, SEQ ID No 37 to 44, SEQ ID No 51, SEQ ID No 52, SEQ ID No 55 to 57, SEQ ID No 63 to 65, SEQ ID No 67, SEQ ID No 68, SEQ ID No 85, SEQ ID No 96 to 101, SEQ ID No 103 to 107, SEQ ID No 112 to 19, SEQ ID No 126, SEQ ID No 127, SEQ ID No 130 to 132, SEQ ID No 138 to 140, SEQ ID No 142, SEQ ID No 143, SEQ ID No 154, SEQ ID No 155, SEQ ID No 157, SEQ ID No 162, SEQ ID No 163, SEQ ID No 168, SEQ ID No 196, SEQ ID No 175, SEQ ID No 176, SEQ ID No 179, SEQ ID No 186, SEQ ID No 188, SEQ ID No 189, SEQ ID No 190, SEQ ID No 195.

[0162] In a preferred embodiment, said protein is a secreted protein, and is coded by one of SEQ ID No 1 to 26, SEQ ID No 71, SEQ ID No 76 to SEQ ID No 101, SEQ ID No 154 to SEQ ID No 166.

[0163] In another preferred embodiment, said protein is a membrane associated enzyme, and is coded by one of SEQ ID No 27 to 30, 102 to 105, SEQ ID No 167, SEQ ID No 168 or SEQ ID No 169.

[0164] In another preferred embodiment, said protein is a membrane associated/putative receptor, and is coded by one of SEQ ID No 31 to 44, 74, 106 to 119, and 149, SEQ ID No 152, SEQ ID No 170 to SEQ ID No 174.

[0165] In another preferred embodiment, said protein is a receptor GPCR, an ion channel or a transporter, and is coded by one of SEQ ID No 45 to 52, 120 to 127, SEQ ID No 175 to SEQ ID No 181.

[0166] In another preferred embodiment, said protein is an intracellular enzyme and is coded by one of SEQ ID No 53 to 57, 128 to 132, SEQ ID No 182, SEQ ID No 183 or SEQ ID No 184.

[0167] In another preferred embodiment, said protein is a transcription factor or an orphan nuclear receptor and is coded by one of SEQ ID No 58 to 64, 69, 133 to 139, 144, SEQ ID No 151, SEQ ID No 185 to SEQ ID No 192.

[0168] In another preferred embodiment, said protein is involved in intracellular signal transduction and is coded by one of SEQ ID No 65 to 68, and 140 to 143, SEQ ID No 153, SEQ ID No 193 to SEQ ID No 196.

[0169] In another preferred embodiment, said protein is coded by one of SEQ ID No 70, 72, 73, 75, 145, 146, 147, 148, and 150.

[0170] The present invention thus allows the detection, identification and/or screening of compounds that may be useful for the treatment of osteoporosis. Nevertheless, the compounds identified by one of the methods according to the invention, in order to be used in a therapeutic treatment, may need to be optimized, in order to have a superior activity and/or a lesser toxicity.

[0171] Indeed, the development of new drugs is often performed on the following basis:

[0172] screening of compounds with the sought activity, on a relevant model, by an appropriate method,

[0173] selection of the compounds that have the required properties from the first screening test (here, modulation of osteogenesis),

[0174] determination of the structure (in particular the sequence (if possible the tertiary sequence) if they are peptides, proteins or nucleic acids, formula and backbone if they are chemical compounds) of the selected compounds,

[0175] optimization of the selected compounds, by modification of the structure (for example, by changing the stereochemical conformation (for example passage of the amino acids in a peptide from L to D), addition of substituants on the peptidic or chemical backbones, in particular by grafting groups or radicals on the backbone, modification of the peptides (se in particular Gante “Peptidomimetics”, in Angewandte Chemie-International Edition Engl. 1994, 33. 1699-1720),

[0176] passage and screening of the “optimized” compounds on appropriate models that are often models nearer to the studied pathology. At this stage, one would often use animal models, in particular rodents (rats or mice) or dogs or non-human primates, that are good the models of osteoporosis, or that allow the study of osteogenesis by measurement of the increase of bone density in the animals after administration of the compound.

[0177] Therefore, the present invention also relates to a method for identifying a compound useful for treatment of osteoporosis, comprising the steps of:

[0178] a) performing a method of the invention, as described above,

[0179] b) modifying the compound selected in step a),

[0180] c) testing the modified compound of step b) in in vitro and/or in vivo models relevant for assessment of osteoporosis,

[0181] d) identifying the compound having a anti-osteoporosis activity superior than for the compound selected in step a).

[0182] Step d) of the preceding method he method of may be replaced and/or completed by a step d′):

[0183] d′) identifying the compound having the searched biological effect on osteoporosis, with a reduced toxicity in an animal model than the compound selected in step a).

[0184] The present invention also relates to the compounds identified by one of the methods of the invention, especially the compounds that have a role in stimulation of bone formation or bone density increase, and/or that are useful for treatment of osteoporosis.

[0185] A compound identified by a method according to the invention may be a compound with a chemical backbone, a lipid, a carbohydrate (sugar), a protein, a peptide, an hybrid compound protein-lipid, protein-carbohydrate, peptide-lipid, peptide carbohydrate, a protein or a peptide on which has been branched different chemical residues.

[0186] The foreseen chemical compounds (with a chemical backbone), may contain one or more (up to 3 or 4) cycles, especially aromatic cycles, in particular having from 3 to 8 atoms of carbon, and having all kinds of branched groups (in particular lower alkyl, i.e. having from 1 to 6 atoms of carbon, keto groups, alcohol groups, halogen groups . . . ). The person skilled in the art knows how to prepare different variants of a compound starting from a given backbone by grafting these radicals on said backbone.

[0187] These compounds, may be used for the preparation of a medicament, destined for the treatment of bone diseases, in particular osteoporosis, or for the promotion of osteogenesis remodeling of bones, and/or increase of bone density.

[0188] The present invention also relates to an isolated nucleic acid sequence upregulated in osteogenesis chosen from the group consisting of:

[0189] a) one of SEQ ID No 1 to SEQ ID No 9, SEQ ID No 11 to 20, SEQ ID No 27, SEQ ID No 33 to 36, SEQ ID No 45 to 50, SEQ ID No 53, SEQ ID No 54, SEQ ID No 58 to 62, SEQ ID No 66, SEQ ID NO 69 to 75, SEQ ID No 76 to SEQ ID No 84, SEQ ID No 86 to 95, SEQ ID No 102, SEQ ID No 108 to 111, SEQ ID No 120 to 125, SEQ ID No 128, SEQ ID No 129, SEQ ID No 133 to 137, SEQ ID No 141, SEQ ID No 144 to 150, SEQ ID No 156, SEQ ID No 158 to SEQ ID No 161, SEQ ID No 164 to SEQ ID No 167, SEQ ID No 170 to SEQ ID No 174, SEQ ID No 176, SEQ ID No 177, SEQ ID No 178, SEQ ID No 180 to SEQ ID No 185, SEQ ID No 187, SEQ ID No 191 to SEQ ID No 194, SEQ ID No 196,

[0190] b) an isolated and purified nucleic acid comprising the nucleic acid of a)

[0191] c) an isolated nucleic acid that specifically hybridizes under stringent conditions to the complement of the nucleic acid of a), wherein said nucleic acid encodes a protein that is upregulated in osteogenesis

[0192] d) an isolated nucleic acid having at least 80% homology with the nucleic acid of a), wherein said nucleic acid encodes a protein that is upregulated in osteogenesis

[0193] e) a fragment of the nucleic acid of a) comprising at least 15 nucleotides.

[0194] In a preferred embodiment, said nucleic acid codes for a secreted protein, and is one of SEQ ID No 1 to 9, 11 to 20, SEQ ID No 71, SEQ ID No 76 to SEQ ID No 84, 86 to 95, SEQ ID No 156, SEQ ID No 158 to SEQ ID No 16.1, SEQ ID No 164 to SEQ ID No 166.

[0195] In another preferred embodiment, said nucleic acid codes for a membrane associated enzyme, and is one of SEQ ID No 27 and SEQ ID No 102 SEQ ID No 167.

[0196] In another preferred embodiment, said nucleic acid codes for a membrane associated/putative receptor, and is one of SEQ ID No 33 to 36, 74, 108 to 111, and 149, SEQ ID No 152, SEQ ID No 170 to SEQ ID No 174.

[0197] In another preferred embodiment, said nucleic acid codes for a receptor GPCR, an ion channel or a transporter, and is one of SEQ ID No 45 to 50, 120 to 125, SEQ ID No 176, SEQ ID No 177, SEQ ID No 178, SEQ ID No 180 to SEQ ID No 181.

[0198] In another preferred embodiment, said nucleic acid codes for an intracellular enzyme and is one of SEQ ID No 53, 54, 128 and 129, SEQ ID No 182, SEQ ID No 183 or SEQ ID No 184.

[0199] In another preferred embodiment, said nucleic acid codes for a transcription factor or an orphan nuclear receptor and is one of SEQ ID No 58 to 62, 69, 133 to 137, 144, SEQ ID No 151, SEQ ID No 185, SEQ ID No 187, SEQ ID No 191 to SEQ ID No 192.

[0200] In another preferred embodiment, said nucleic acid codes for a protein involved in intracellular signal transduction and is one of SEQ ID No 66, and 141, SEQ ID No 153, SEQ ID No 193, SEQ ID No 194, SEQ ID No 196.

[0201] In another preferred embodiment, said nucleic acid is one of SEQ ID No 70, 72, 73, 75, 145, 146, 147, 148, and 150.

[0202] The invention also relates to an isolated nucleic acid sequence downregulated in osteogenesis, chosen from the group consisting of:

[0203] a) one of SEQ ID No 10, SEQ ID No 21 to 26, SEQ ID No 28 to 32, SEQ ID No 37 to 44, SEQ ID No 51, SEQ ID No 52, SEQ ID No 55 to 57, SEQ ID No 63 to 65, SEQ ID No 67, SEQ ID No 68, SEQ ID No 85, SEQ ID No 96 to 101, SEQ ID No 103 to 107, SEQ ID No 112 to 119, SEQ ID No 126, SEQ ID No 127, SEQ ID No 130 to 132, SEQ ID No 138 to 140, SEQ ID No 142, SEQ ID No 143, SEQ ID No 154, SEQ ID No 155, SEQ ID No 157, SEQ ID No 162, SEQ ID No 163, SEQ ID No 168, SEQ ID No 196, SEQ ID No 175, SEQ ID No 176, SEQ ID No 179, SEQ ID No 186, SEQ ID No 188, SEQ ID No 189, SEQ ID No 190, SEQ ID No 195,

[0204] b) an isolated and purified nucleic acid comprising the nucleic acid of a)

[0205] c) an isolated nucleic acid that specifically hybridizes under stringent conditions to the complement of the nucleic acid of a), wherein said nucleic acid encodes a protein that is upregulated in osteogenesis

[0206] d) an isolated nucleic acid having at least 80% homology with the nucleic acid of a), wherein said nucleic acid encodes a protein that is upregulated in osteogenesis

[0207] e) a fragment of the nucleic acid of a) comprising at least 15 nucleotides.

[0208] In a preferred embodiment, said nucleic acid codes for a secreted protein, and is one of SEQ ID No 10, SEQ ID No 21 to 26, SEQ ID No 85, SEQ ID No 96 to 101, SEQ ID No 154, SEQ ID No 155, SEQ ID No 157, SEQ ID No 162, SEQ ID No 163.

[0209] In another preferred embodiment, said nucleic acid codes for a membrane associated enzyme, and is one of SEQ ID No 28 to 30, 103 to 105, SEQ ID No 168, SEQ ID No 169.

[0210] In another preferred embodiment, said nucleic acid codes for a membrane associated/putative receptor, and is one of SEQ ID No 31, SEQ ID No 32, SEQ ID NO 37 to 44, SEQ ID No 106, SEQ ID No 107 and SEQ ID No 112 to 119.

[0211] In another preferred embodiment, said nucleic acid codes for a receptor GPCR, an ion channel or a transporter, and is one of SEQ ID No 51, 52, 126, 127, SEQ ID No 175, SEQ ID No 176, SEQ ID No 179.

[0212] In another preferred embodiment, said nucleic acid codes for an intracellular enzyme and is one of SEQ ID No 55 to 57, 130 to 132.

[0213] In another preferred embodiment, said nucleic acid codes for a transcription factor or an orphan nuclear receptor and is one of SEQ ID No 63, 64, 138, and 139, SEQ ID No 186, SEQ ID No 188, SEQ ID No 189, SEQ ID No 190.

[0214] In another preferred embodiment, said nucleic acid codes for a protein involved in intracellular signal transduction and is one of SEQ ID No 65, 67, 68, 140, 142, and 143, SEQ ID No 195.

[0215] Most preferred nucleic acids according to the invention are SEQ ID No 3, 4, 6, 8, 10, 11, 13, 15, 20 to 23, 27, 31, 32, 33, 35, 37, 40, 43 to 46, 48, 50 to 52, 54, 56, 57, 63 to 75, 78, 79, 81, 83, 85, 86, 88, 90, 95 to 98, 102, 106, 107, 108, 110, 112, 115, 118 to 121, 123, 125 to 127, 129, 131, 132, 138 to 150.

[0216] In some embodiments, the invention relates to a acid nucleic, the expression of which is modulated during osteogenesis, and that codes for a protein that is part of the Wnt-frizzled family, and is preferably one of SEQ ID No 197 to SEQ ID No 210.

[0217] In another preferred embodiment, the invention relates to a acid nucleic, the expression of which is modulated during osteogenesis, and that codes for a protein that is part of the Ephin-ephrin family and is preferably one of SEQ ID No 211 to SEQ ID No 229.

[0218] In another preferred embodiment, the invention relates to a acid nucleic, the expression of which is modulated during osteogenesis, and that codes for a protein that is part of the Tyro3 family and is preferably one of SEQ ID No 230 to SEQ ID No 234.

[0219] In another preferred embodiment, the invention relates to a acid nucleic, the expression of which is modulated during osteogenesis, and that codes for a protein that is part of the CCN family and is preferably one of SEQ ID No 235 to SEQ ID No 245.

[0220] By isolated and purified nucleic acid of b), it is in particular meant to mean a vector comprising the nucleic acid of a).

[0221] The stringent hybridization conditions may be defined as described in Sambrook et al. ((1989) Molecular cloning: a laboratory manual. 2^{nd} Ed. Cold Spring Harbor Lab., Cold Spring Harbor, N.Y.), with the following conditions: 5× or 6×SCC, 60° C. Highly stringent conditions that can also be used for hybridization are defined with the following conditions: 6×SSC, 65° C.

[0222] Hybridization ADN-ADN or ADN-ARN may be performed in two steps: (1) prehybridization at 42° C. pendant 3 h in phosphate buffer (20 mM, pH 7;5) containing 5 or 6×SSC (1×SSC corresponding to a solution 0.15 M NaCl+0.015 M sodium citrate), 50% formamide, 7% sodium dodecyl sulfate (SDS), 10× Denhardt's, 5% dextran sulfate et 1% salmon sperm DNA; (2) hybridization during up to 20 at a temperature of 60 or 65° C. followed by different washes (about 20 minutes at in 2×SSC+2% SDS, then 0.1×SSC+0.1% SDS). The last wash is performed in 0.1×SSC+0.1% SDS for about 30 minutes at about 60-65° C. this high stringency hybridization conditions may be adapted by a person skilled in the art.

[0223] Two polynucleotides are said to be “identical” or “homologous” if the sequence of nucleotides or amino acid residues, respectively, in the two sequences is the same when aligned for maximum correspondence as described below. The term “complementary to” is used herein to mean that the complementary sequence is identical to all or a specified contiguous portion of a reference polynucleotide sequence. Sequence comparisons between two (or more) polynucleotides or polypeptides are typically performed by comparing sequences of two optimally aligned sequences over a segment or “comparison window” to identify and compare local regions of sequence similarity. Optimal alignment of sequences for comparison may be conducted by the local homology algorithm of Smith and Watemian, Ad. App. Math 2: 482 (1981), by the homology alignment algorithm of Neddleman and Wunsch, J. Mol. Biol. 48:443 (1970), by the search for similarity method of Pearson and Lipman, Proc. Natl. Acad. Sci. (U.S.A.) 85:2444 (1988), by computerized implementation of these algorithms (GAP, BESTFIT, BLAST N, BLAST P, FASTA, and TFASTA in the Wisconsin Genetics Software Package, Genetics Computer Group (GCG), 575 Science Dr., Madison, Wis.), or by inspection. In order to determine the optimal window of alignment, the BLAST program could be used, using matrix BLOSUM 62, or matrices PAM or PAM250.

[0224] “Percentage of sequence identity or homology” is determined by comparing two optimally aligned sequences over a comparison window, where the portion of the polynucleotide sequence in the comparison window may comprise additions or deletions (i.e., gaps) as compared to the reference sequence (which does not comprise additions or deletions) for optimal alignment of the two sequences. The percentage is calculated by determining the number of positions at which the identical nucleic acid base or amino acid residue occurs in both sequences to yield the number of matched positions, dividing the number of matched positions by the total number of positions in the window of comparison and multiplying the result by 100 to yield the percentage of sequence identity.

[0225] The nucleic acid of d) presents an homology of at least 80%, more preferably 90%, more preferably 95%, more preferably 98%, the most preferable being 99% with the nucleic acid of a).

[0226] The fragment of the nucleic acid of a) contain at least 15 bases, more preferably 25, 50, 75, 100, 150, 200, 300 bases. This fragments may be used as primers for amplification, or as probes especially when looking for homologous DNA or DNA hybridizing with the nucleic acid of a). These fragments may be labeled as described above.

[0227] The invention also relates to an isolated protein or peptide coded by a nucleic acid of the invention. These proteins or peptides can be obtained after cloning the nucleic acid of the invention in an expression vector, that contains the elements that are necessary for the expression of said protein or peptide in a host cell (prokaryotic or eucaryotic). Such an expression vector may also contain the elements allowing secretion of the protein or peptide. An host cell containing such an expression vector is also an object of the invention.

[0228] The expression vectors of the invention contain preferably a promoter, traduction initiation and termination signals, as well as appropriate regions for regulating transcrition. They need to be maintained in the host cell. The person skilled in the art is aware of such vectors and of the ways to produce and purify proteins, especially by using labels (like Histidine Tag, or glutathione). It is also possible to use in vitro translation kits that are widely available, to produce the protein or peptide according to the invention.

[0229] The invention also relates to monoclonal or polyclonal antibodies that specifically recognize the protein or peptide of the invention, as well as their fragments, chimeric antibodies, immunoconjugates.

[0230] Specific polyclonal antibodies may be obtained from the serum of an animal that has been immunized by a protein or a peptide according to the invention, optionally using an appropriate adjuvant.

[0231] Specific monoclonal antibodies may be obtained by the hybridoma culture method described by Köhler et Milstein (1975 Nature 256, 495).

[0232] The antibodies according to the invention are, for example, chimeric antibodies, humanized antibodies, Fab ou F(ab′)₂ fragments. They may be immunoconjugates or labeled antibodies.

[0233] The antibodies of the invention are well suited for the diagnosis and therapeutic methods of the invention.

[0234] The invention also relates to a pharmaceutical composition comprising an pharmaceutically acceptable excipient with at least one of a compound of the invention, a nucleic acid of the invention, a protein of the invention, an antibody of the invention. Appropriate excipients are well known of the person skilled in the art for such a purpose.

[0235] The invention also relates to a method for the therapy of a bone disease, especially osteoporosis, or to a method for increasing bone density and/or promoting osteogenesis, comprising administering to a subject one of a compound according to the invention, a nucleic acid according to the invention a protein according to the invention, an antibody according to the invention, and/or a pharmaceutical composition according to the invention.

[0236] The invention also relates to the use of a compound according to the invention, especially having an anti-osteoporosis activity, a nucleic acid according to the invention, a protein according to the invention, an antibody according to the invention, and/or a pharmaceutical composition according to the invention, for the manufacture of a medicament for the treatment of a bone disease, especially osteoporosis, or for increasing bone density and/or promoting osteogenesis

[0237] The present invention also relates to the determination of the binding partners of the proteins coded by on of SEQ ID No 1 to SEQ ID No 150, or SEQ ID NO 151, 152 or 153, or SEQ ID No 154 to SEQ ID No 196, or SEQ ID No 197 to SEQ ID No 210, or SEQ ID No 211 to SEQ ID No 229, or SEQ ID No 230 to SEQ ID NO 234, or SEQ ID No 235 to SEQ ID No 245 by using the double hybrid assay, as described by Finley and Brent (Interaction trap cloning with yeast, 169-203, in DNA Cloning, Expression Systems: a practical Approach, 1995, Oxford Universal Press, Oxford, the content of which is incorporated herein by reference).

[0238] Basically, a yeast strain is transformed by two plasmids encoding either the bait protein (the protein coded by one of SEQ ID No 1 to SEQ ID No 150, or SEQ ID NO 151, 152 or 153, or SEQ ID No 154 to SEQ ID No 196, or SEQ ID No 197 to SEQ ID No 210, or SEQ ID No 211 to SEQ ID No 229, or SEQ ID No 230 to SEQ ID No 234, or SEQ ID No 235 to SEQ ID No 245) or the protein supposed to be a binding partner of the bait protein (the prey protein).

[0239] Upon binding of the 2 proteins, a reporting gene is induced and the yeast becomes able to metabolize a substrate in the medium. It is thus possible to determine the binding between two proteins. It is very quick to use a cDNA library in order to screen multiple preys at the same time.

[0240] The invention also relates to the complexes that are made of a protein coded by one of SEQ ID No 1 to SEQ ID No 150, or SEQ ID No 151, 152 or 153, or SEQ ID NO 154 to SEQ ID No 196, or SEQ ID No 197 to SEQ ID No 210, or SEQ ID No 211 to SEQ ID No 229, or SEQ ID No 230 to SEQ ID No 234, or SEQ ID No 235 to SEQ ID No 245 and one of its binding partners.

[0241] The invention is also directed towards the promoters of the genes that lead to the cDNAs represented by one of SEQ ID No 1 to SEQ ID No 150, or SEQ ID No 151, 152 or 153, or SEQ ID No 154 to SEQ ID No 196, or SEQ ID No 197 to SEQ ID NO 210, or SEQ ID No 211 to SEQ ID No 229, or SEQ ID No 230 to SEQ ID No 234, or SEQ ID No 235 to SEQ ID No 245. Indeed, the person skilled in the art can map said genes on the chromosomes, especially by using the data released from the Human Genome Project, and can therefore identify the elements of regulation of transcription. This would lead to the possibility of expressing a foreign protein only in a bone-related environment.

[0242] The invention also relates to transgenic animals, except for human beings, in the genome of which has been inserted a nucleic acid sequence according to the invention, especially one of SEQ ID No 1 to SEQ ID No 150, or SEQ ID No 151, 152 or 153, or SEQ ID No 154 to SEQ ID No 196, or SEQ ID No 197 to SEQ ID No 210, or SEQ ID No 211 to SEQ ID No 229, or SEQ ID No 230 to SEQ ID No 234, or SEQ ID No 235 to SEQ ID No 245, at a locus that is not the natural locus. These animals can have a great utility for the development of osteoporosis or bone-related diseases models.

[0243] The person skilled in the art is aware of the ways to prepare transgenic animals, especially by homologous recombination on embryonic stem cells, transfer of said stem cells to embryos, selection of the chimeras that are affected at the reproductive level, growth of said chimeras.

[0244] The invention also relates to a transgenic non-human mammal having integrated into its genome a nucleic acid sequence according to the invention, especially one of SEQ ID No 1 to SEQ ID No 150, or SEQ ID No 151, 152 or 153, or SEQ ID No 154 to SEQ ID No 196, or SEQ ID No 197 to SEQ ID No 210, or SEQ ID No 211 to SEQ ID No 229, or SEQ ID No 230 to SEQ ID No 234, or SEQ ID NO 235 to SEQ ID No 245, preferably at a locus that is not the natural locus, operatively linked to regulatory elements, wherein expression of said coding sequences increases the level of the related proteins in said mammal relative to a non-transgenic mammal of the same species, said transgenic mammal exhibiting a difference in bone formation and/or regeneration and/or regulation as compared to a non-transgenic animal.

[0245] It is also envisioned that the regulatory elements (promoters, enhancers, introns, similar to those that can be used in mammalian expression vectors) may be tissue-specific, which allows over-expression of the proteins only in a specific type of cells. In particular, the person skilled in the art is aware of the different promoters that can be used for this purpose.

[0246] The insertion of the construct in the genome of the transgenic animal of the invention may be performed by methods well known by the artisan in the art, and can be either random or targeted. In a few words, the person skilled in the art will construct a vector containing the sequence to insert within the genome, and a selection marker (for example the gene coding for the protein that gives resistance to neomycine), and may have it enter in the Embryonic Stem (ES) cells of an animal. The cells are then selected with the selection marker, and incorporated into an embryo, for example by microinjection into a blastocyst, that can be harvested by perfusing the uterus of pregnant females. Reimplantation of the embryo and selection of the transformed animals, followed by potential back-crossing allow to obtain such transgenic animal. To obtain a “cleaner” animal, the selection marker gene may be excised by use of a site-specific recombinase, if flanked by the correct sequences.

[0247] The invention also relates to a transgenic non-human mammal whose genome comprises a disruption of an endogenous nucleic acid sequence according to the invention, a nucleic acid sequence according to the invention, especially one of SEQ ID No 1 to SEQ ID No 150, or SEQ ID No 151, 152 or 153, or SEQ ID No 154 to SEQ ID No 196, or SEQ ID No 197 to SEQ ID No 210, or SEQ ID No 211 to SEQ ID No 229, or SEQ ID No 230 to SEQ ID No 234, or SEQ ID No 235 to SEQ ID No 245 wherein said disruption comprises the insertion of a selectable marker sequence, and wherein said disruption results in said non-human mammal exhibiting a difference in bone formation and/or regeneration and/or regulation as compared to a wild-type non-human mammal.

[0248] In a preferred embodiment, said disruption is a homozygous disruption.

[0249] In a preferred embodiment, said homozygous disruption results in a null mutation of the endogenous gene especially one of SEQ ID No 1 to SEQ ID No 150, or SEQ ID No 151, 152 or 153, or SEQ ID No 154 to SEQ ID No 196, or SEQ ID No 197 to SEQ ID No 210, or SEQ ID No 211 to SEQ ID No 229, or SEQ ID No 230 to SEQ ID No 234, or SEQ ID No 235 to SEQ ID No 245.

[0250] In a preferred embodiment, said mammal is a rodent, in the most preferred embodiment, said rodent is a mouse. In this case, the disrupted gene is chosen between SEQ ID No 1 to SEQ ID No 75.

[0251] The invention also encompasses an isolated nucleic acid comprising a nucleic acid sequence of the invention, especially one of SEQ ID No 1 to SEQ ID No 150, or SEQ ID No 151, 152 or 153, or SEQ ID No 154 to SEQ ID No 196, or SEQ ID No 197 to SEQ ID No 210, or SEQ ID No 211 to SEQ ID No 229, or SEQ ID NO 230 to SEQ ID No 234, or SEQ ID No 235 to SEQ ID No 245, knockout construct comprising a selectable marker sequence flanked by DNA sequences homologous to said nucleic acid sequence, wherein when said construct is introduced into a non-human mammal or an ancestor of said non-human mammal at an embryonic stage, said selectable marker sequence disrupts the endogenous gene in the genome of said non-human mammal such that said non-human mammal exhibits a difference in bone formation and/or regeneration and/or regulation as compared to a wild-type non-human mammal.

[0252] Said construct is used to obtain the animals that have the disrupted copy of the nucleic acid sequence of the invention, and are generally carried on a vector that is also an object of the invention.

[0253] The invention also relates to a mammalian host cell whose genome comprises a disruption of an endogenous nucleic acid sequence of the invention, especially one of SEQ ID No 1 to SEQ ID No 150, or SEQ ID No 151, 152 or 153, or SEQ ID No 154 to SEQ ID No 196, or SEQ ID No 197 to SEQ ID No 210, or SEQ ID No 211 to SEQ ID No 229, or SEQ ID No 230 to SEQ ID No 234, or SEQ ID NO 235 to SEQ ID No 245, wherein said disruption comprises the insertion of a selectable marker sequence. Preferably, said disruption is homozygous and leads to a non-expression of the related functional protein (or expression of a non-functional protein).

[0254] It is to be noted that the disruption may be obtained by methods known in the art and may be conditional, i.e. only present in specific types of cells, or induced at some moments of the development. The method to achieve such a goal may be to use site specific recombinases such as Cre (recognizing lox sites) or FLP (recognizing FRT sites) recombinases, under the control of cell-specific promoters. These recombinases (especially Cre) have been shown to be suitable for modifications and their activity may be induced by injection of a substrate (such as an hormone). These modifications are known in the art and may be found, for example in Shibata, et al. (1997, Science 278, 120-3).

[0255] Therefore, the transgenic animal or the cell of the invention may not show anymore the selectable marker, which may have been removed upon action of the recombinases, that lead to the disruption of the gene. Nevertheless, in the process of obtaining such disruption, a selectable marker has been inserted within the nucleic acid of the invention, mostly to allow selection of the transformed cells.

[0256] U.S. Pat. No. 6,087,555 describes one way of obtaining a knock-out mouse, and the general teaching of this patent is incorporated herein by reference (column 5, line 54 to column 10 line 13). In this patent, it is described an OPG knock-out mouse, but the same method applies to any knock-out mouse. The person skilled in the art will also find information in Hogan et al. (Manipulating the Mouse Embryo: a Laboratory Manual, Cold Spring Harbor Laboratory Press, Cold Spring Harbor, N.Y.; 1986).

[0257] The animals and “knock-out” cells of the invention may also be used for identification of pharmacologically interesting compounds. Therefore, the invention also relates to a method of screening compounds that modulate osteoporosis and/or osteogenesis and/or bone regeneration, comprising contacting a compound with the non-human mammal or the knock-out host cell of the invention, and determining the increase or difference in osteogenesis and/or bone regeneration into said non-human mammal or said host cell as compared to the level of osteogenesis and/or bone regeneration of said non-human mammal or said host cell prior to the administration of the compound.

[0258] Preferred sequences for performing this transgenic and/or knock-out animals are in particular SEQ ID No 7, 9, 11, 28, 31, 46, 47, 48 and/or 65.

[0259] All the above developed aspects of the invention may also be performed, in the context of the invention, with specific nucleic acids that are all related in the same families. In the following, all the references relate to GenBank (www.ncbi.nim.nih.gov).

[0260] In particular, it is interesting to develop diagnosis tests that follow expression of the different genes of these families, in order to detect osteoporosis. These diagnosis tests are preferably performed on DNA chips that comprise different probes from the different genes of the family. The person skilled in the art can easily optimize the choice of the better genes that can be integrated on the chip.

[0261] Methods for screening compounds that interfere with bone development are also a aspect of the invention, as the compound that modulate expression of the genes of the families are good candidate and warrant to be tested on other models.

[0262] One can in particular use the same models as developed by the inventors and described in the examples, or use other models of osteoblastic maturation.

[0263] Methods of therapy using all or part of the genes or proteins of the family that are disclosed in the present invention are also part of the invention.

[0264] In an embodiment, preferred nucleic acids according to the invention are members of the Wnt-frizzled proteins. This family of proteins is well known by the person skilled in the art, and comprises a large number of members, including transcription factors. The sequence of these proteins may be found on genomic library such as GenBank (www.ncbi.nim.nih.gov). Members of this family have been identified, such as SEQ ID No 5, SEQ ID No 80, SEQ ID No 49, SEQ ID No 124, SEQ ID No 177, SEQ ID No 178.

[0265] Indeed, the inventors have demonstrated that the members of this family are differentially expressed during bone development, and that there are lots of interactions between expression of members of this family and bone development (FIGS. 1 to 9).

[0266] The GenBank sequences of some members of the Wnt-frizzled family are NM_{—}003393 (WNT8B), NM_{—}058244 (WNT8A), transcript variant 2, NM_{—}058238 (WNT7B), NM_{—}004625 (WNT7A), NM_{—}003508 (FZD9), NM_{—}031933 (WNT8A), transcript variant 1, NM_{—}030761 (WNT4), NM_{—}032642 (WNT5B), transcript variant 1, NM_{—}030775 (WNT5B), transcript variant 2, NM_{—}003392 (WNT5A), NM_{—}057168 (WNT16), transcript variant 1, NM_{—}016087 (WNT16), transcript variant 2, NM_{—}003391 (WNT2), NM_{—}033131 (WNT3A), NM_{—}030753 (WNT3), NM_{—}063396 (WNT15), NM_{—}004626 (WNT11), NM_{—}006522 (WNT6), NM_{—}005430 (WNT1), NM_{—}003394 (WNT10B), NM_{—}025216 (WNT10A), NM_{—}003395 (WNT14), NM_{—}024494 (WNT2B), transcript variant WNT-2B2, NM_{—}004185 (WNT2B), transcript variant WNT-2B1, NM_{—}003012 (SFRP1), NM_{—}031866 (FZD8), NM_{—}003014 (SFRP4), NM_{—}017412 (FZD3), NM_{—}012193 (FZD4), NM_{—}007197 (FZD10), NM_{—}001466 (FZD2), NM_{—}003508 (FZD9), NM_{—}003507 (FZD7), NM_{—}003506 (FZD6), NM_{—}003468 (FZD5), NM_{—}003505 (FZD1) NM_{—}003392 (WNT5A), NM_{—}003015 (SFRP5), NM_{—}001463 (FRZB), XM_{—}050625 (SFRP2), NM_{—}031283 (TCF-3), NM_{—}003199 (TCF-4).

[0267] In particular, one can cite frizzled 1 (SEQ ID No 205), frizzled 2 (SEQ ID No 206), frizzled 3 (SEQ ID No 207), frizzled 4 (SEQ ID No 208), SFRP1 (SEQ ID No 203), SFRP2 (SEQ ID No 197) and SFRP4 (SEQ ID No 204), wnt1 (SEQ ID No 202), wnt2b (SEQ ID No 198, 199), wnt2 (SEQ ID No 200), wnt3a (SEQ ID No 201), TCF-3 (SEQ ID No 209), TCF-4 (SEQ ID No 210) which are preferred members of the family.

[0268] Wnt proteins belong to a large family of cysteine-rich secreted ligands that control development in many organisms from nematodes to mammals. In vertebrates, the Wnt signaling pathway regulates organ development and cellular proliferation, morphology, motility, and cell fate. In the current proposed models, the serine/threonine kinase, GSK-3bl targets cytoplasmic β-catenin for degradation in the absence of Wnt. As a result, cytoplasmic β-catenin levels are low. When Wnt acts on its cell surface receptor Frizzled, dishevelled (Dvl), a cytoplasmic protein, is activated and antagonizes the action of GSK-3. The phosphorylation of β-catenin is reduced and □β-catenin is no longer degraded, resulting in its accumulation in the cytoplasm. Accumulated β-catenin is translocated into the nucleus where it binds to Tcf/Lef, a transcription factor, and stimulates gene expression. In the nucleus, several proteins that bind to Tcf/Lef regulate the complex formation of β-catenin-Tcf-DNA.

[0269] Therefore, it appears that β-catenin signaling is regulated in both the cytoplasm and nucleus. Secreted-frizzled related proteins (sFRP) are decoy receptors that are secreted and bind Wnt ligands preventing interactions with frizzled receptors, thus inhibiting Wnt activity. Dkk1, is also a Wnt inhibitor, but unlike sFRP, it does not interact directly with Wnt.

[0270] Indeed several Wnt (i.e., Wnt2b and Wnt10a), frizzled (i.e., Fz1, Fz3 and Fz4), sFRP (i.e., sFRP2) and TCF (i.e., TCF1) are regulated in the gene profiling experiments performed by the inventors. Besides, many other players of this same pathway are expressed in cells mentioned above.

[0271] The inventors have experimentally showed that overexpression of distinct Wnt, including Wnt1, Wnt2 or Wnt3a increases the production of alkaline phosphatase by pluripotent cells C3H10T1/2, ST2 and C2C12, clearly indicating that those proteins induce osteoblast differentiation (FIG. 1). In addition, overexpression of β-catenin stable mutant, the downstream player of Wnt signaling, also induces osteoblast differentiation of the same cells as determined by measuring the alkaline phosphatase activity.

[0272] The involvement of the Wnt pathway in oestoblast differentiation was further evidenced by the fact that Dvl-dominant negative form was able to antagonize the activity of Wnt1, Wnt2 and Wnt3a in pluripotent C3H10T1/2 and C2C12.

[0273] The inventors have also tested the capacity of Fz1 to interact with Wnt proteins and thus affect osteoblast differentiation. Overexpression of Fz1 decreased the activity of Wnt1, Wnt2 and Wnt3a in pluripotent cells C3H10T1/2 as determined by the alkaline phosphatase measurement (FIG. 4). However the expression of Fz3 or Fz4 increased the activity of Wnt proteins in the differentiation process (FIG. 6). In addition, in C3H10T1/2 cells, sFRP2 was able to inhibit Wnt3a-induced alkaline phosphatase, but not Wnt1 and Wnt2 (FIG. 5). This indicate that Frizzled may negatively or positively cooperate with their ligand proteins, Wnt, in these bone-related cells.

[0274] We have also showed that Wnt signalling is required for osteoblast differentiation induced by distinct morphogenic proteins including BMP2 and Sonic hedgehog (Shh). In fact, Dvl-dominant negative form inhibited the ability of BMP2 to increase the osteoblast differentiation marker alkaline phosphatase in pluripotent cells C3H10T1/2 and C2C1/2 and the ability of Shh to do the same in C3H10T1/2 cells.

[0275] Casein kinase 11, and important kinase in the Wnt signaling pathway, interacts with β-catenin, phosphorylates it and increases its stability and activity. Apigenin, a casein kinase 11 inhibitor, was able to block the activity of BMP-2 and Shh in pluripotent cells C3H10T1/2, ST2 and C2C12 (FIG. 7). The effect of TCF proteins was also investigated, and both TCF3 and TCF4 were found as inhibitors of BMP-2 in C3H10T1/2 cells (FIG. 3).

[0276] From this data, it can clearly be stated that Wnt/frizzled is an important pathway that is involved in osteoblast differentiation and bone formation, and that any element within this pathway (extracellular ligands or inhibitors; Frizzled receptors modeling; intracellular signaling; etc) can thus represent a target for drug discovery in the field of osteoporosis, bone remodeling, or any other pathology related to bone formation.

[0277] Thus, all the different facets of the invention can be applied to the members of the Wnt-frizzled family as described above, and especially to the particular members that have been pointed out (through the GenBank references, or SEQ ID No 197 to SEQ ID No 210).

[0278] It is particularly interesting to use some probes from the Wnt-frizzled family to define a DNA chip, that may be useful for monitoring osteoporosis (diagnosis, evolution of the disease . . . ). It is also interesting to use some members of the family as targets to identify new drugs that interfere with the biological pathway associated with this family, and that can be useful for treating osteoporosis. Methods of screening compounds that are linked to the Wnt-frizzled pathway, and that interfere with the role of Wnt-frizzled proteins during osteogenesis and/or bone loss, especially using read-outs such as the read-outs described above and in the figures (alkaline phosphatase) are particularly interesting.

[0279] In this embodiment, one can also cite the proteins that are downstream the Wnt signaling pathway, and in particular the WISP (Wnt1 inducible signaling pathway) proteins. One can cite SEQ ID No 235 and SEQ ID No 236 (WISP1, NM_{—}080838 and NM 003882), SEQ ID No 237 (WISP2; NM_{—}003881)1 SEQ ID No 238 and SEQ ID No 239 (WISP3, NM_{—}130396 and NM_{—}003880).

[0280] These proteins are part of the larger CCN family (Perbal, Mol Pathol 2001 April; 54(2):57-79) and are thus known by the person skilled in the art. The family comprises the wisp proteins, as well as CTGF (SEQ ID No 240, NM_{—}001901), CYR61 (SEQ ID No 241, NM_{—}001554), NOV (SEQ ID No 242, NM_{—}002514), and their receptors, that are the multiligand receptor, low density lipoprotein receptor-related protein (LRP), among which one can cite LRP1 (SEQ ID No 243, NM_{—}002332) and LRP2 (SEQ ID No 244, NM_{—}004525). One can also cite LRP3 (SEQ ID No 244, NM_{—}002333) or LRP4 (SEQ ID No 245, XM_{—}035037).

[0281] The inventors have demonstrated a regulation of the expression of genes of this family during bone development (osteobalastic maturation) (FIG. 12).

[0282] The CCN family of genes encode proteins that participate in fundamental biological processes such as cell proliferation, attachment, migration, differentiation, wound healing, angiogenesis, and several pathologies including fibrosis and tumorigenesis. Whereas CTGF and CYR61 were reported to act as positive regulators of cell growth, NOV (nephroblastoma overexpressed) provided the first example of a CCN protein with negative regulatory properties and the first example of aberrant expression being associated with tumour development. The subsequent discovery of the elm1 (WISP-1), rCOP1 (WISP-2 or CTGF-L), and WISP-3 proteins has broadened the variety of functions attributed to the CCN proteins and has extended previous observations to other biological systems.

[0283] Interestingly, WISP CCN-subfamily members WISP1 and WISP2 were identified by using a PCR-based cDNA subtraction strategy performed to discover downstream genes in the WNT signaling pathway. WISP1 and 2 are upregulated in the mouse mammary epithelial cell line transformed by Wnt1, but not by Wnt4.

[0284] The multiligand receptor, low density lipoprotein receptor-related protein/alpha(2)-macroglobulin receptor (LRP1). has been recently demonstrated to be a high affinity receptor for CTGF.

[0285] The inventors have demonstrated that CTGF and Cyr61 gene expression decreases and NOV expression increases during differentiation of calvaria cells (FIG. 12). CTGF was also found to be down-regulated during the maturation of MC3T3-E1 cells. BMP-2 strongly induces the expression of CTGF in C2C12, C3H10T1/2, ST-2 and MC3T3-E1 cells. In contrast, BMP-2 treatment results in a dramatic decrease of NOV gene expression in C2C12, C3H10T 1/2 and MC3T3-E1 cells. The putative high affinity receptor for CTGF, LRP1 (alpha2 macroglobulin receptor) was found to be down-regulated in the time-course calvaria cultures. LRP1 was also down-regulated in C3H10T1/2, ST-2 and MC3T3-E1 cells treated with BMP-2

[0286] Other receptors belonging to the same family that LRP1 were found to be modulated during the process of osteoblast differentiation/maturation. In this way, Whereas LDLR gene expression decreases during maturation of calvaria cells, LRP2 expression was up-regulated in the same primary cells. LDLR expression was also found to be up-regulated in ST-2 and C3H10T1/2 cells treated with BMP-2, specially when cells were co-treated with Shh (a condition reported to enhance the osteoblast commitment of these cells in response to BMP-2). Given the expression and regulation of different members of both CCN and LDL receptors families in osteoblasts and the recent report indicating that LRP1 is the high affinity receptor for CTGF one can speculate that these families might play crucial roles in osteoblast biology.

[0287] In another embodiment, preferred nucleic acids according to the invention are part of the Ephin receptors and ephrin family (Eph family).

[0288] This family of proteins is well known by the person skilled in the art, and comprises a large number of members, including transcription factors. The sequence of these proteins may be found on genomic library such as GenBank (www.ncbi.nlm.nih.gov). Among some references that relate to this family, one can cite Fox et al., (Oncogene 10 (5), 897-905 (1995)), Lemke (Mol. Cell. Neurosci. 9 (5-6), 331-332 (1997)), Chan et al (Oncogene 6 (6), 1057-1061 (1991)), Bohme et al (Oncogene 8 (10), 2857-2862 (1993)), Boyd et al (J. Biol. Chem. 267 (5), 3262-3267 (1992)).

[0289] Preferred members of this family are in particular EphB3, EphB2 and EphA3.

[0290] In particular, one can cite SEQ ID No 211 (EphA7, CenBank NM_{—}004440), SEQ ID N⁰ 212 (EphA8, NM_{—}020526), SEQ ID No 213 (EphB4, NM_{—}004444), SEQ ID No 214 (EphB3, NM_{—}004443), SEQ ID No 215 (EphB2, transcript variant 1, NM 004442), SEQ ID No 216 (EphB2, transcript variant 2, NM_{—}017449), SEQ ID No 217 (EphB6, NM_{—}004445), SEQ ID No 218 (EphA4, NM_{—}004438), SEQ ID No 219 (EphA1, NM_{—}005232), SEQ ID No 220 (EphA3, NM_{—}005233), SEQ ID No 221 (ephrin-A4 (EFNA4), NM_{—}005227), SEQ ID No 222 (ephrin-A3 (EFNA3), NM_{—}004952), SEQ ID No 223 (EphA2 (EPHA2), NM_{—}004431), SEQ ID No 224 (ephrin-B2 (EFNB2), NM_{—}004093), SEQ ID No 225 (ephrin-B1 (EFNB1), NM_{—}004429), SEQ ID No 226 (ephrin-A1 (EFNA1), NM_{—}004428), SEQ ID No 227 (ephrin-B3 (EFNB3), NM_{—}001406), SEQ ID No 228 (ephrin-A5 (EFNA5), NM_{—}001962), SEQ ID No 229 (ephrin-A2 (EFNA2), NM_{—}001405).

[0291] The Eph receptor proteins (tyrosine kinase receptors) and their ligands, the ephrins, appear to lie functionally at the interface between pattern formation and morphogenesis. As mentioned in GenBank, ephrin receptors and their ligands, the ephrins, mediate numerous developmental processes, particularly in the nervous system. Based on their structures and sequence relationships, ephrins are divided into the ephrin-A (EFNA) class, which are anchored to the membrane by a glycosylphosphatidylinositol linkage, and the ephrin-B (EFNB) class, which are transmembrane proteins. The Eph family of receptors are divided into 2 groups based on the similarity of their extracellular domain sequences and their affinities for binding ephrin-A and ephrin-B ligands. Ephrin receptors make tip the largest subgroup of the receptor tyrosine kinase (RTK) family.

[0292] Both Eph receptors and ephrins are dynamically expressed in a wide range of regions of the vertebrate embryo, in the ectoderm, mesoderm and endoderm. Ephrin-mediated clustering of receptors facilitates autophosphorylation in trans (between receptors) of several tyrosine residues including two in the juxtamembrane (JM) region and one in the activation loop of the kinase domain. Upon ligand-stimulated autophosphorylation of the JM tyrosines, the inhibitory conformation of the JM region is destabilized, the JM phosphotyrosines serve as recruitment sites for proteins containing SH2 domains, and the activation loop becomes phosphorylated for full activity.

[0293] EphB3 receptor gene expression was found to be up-regulated by BMP-2 treatment in two pluripotent mesenchymal cell lines C2C12 and C31410T1/2 under conditions which promote the osteoblast commitment of these cells. Interestingly the level of expression of both EphB3 receptor and EphA3 could be correlated with the degree of maturation of nomial human trabecular osteoblasts. EphB3 and EphB2 gene expression was significantly down-regulated during differentiation in vitro of murine calvaria cells. Gene expression analysis demonstrated that in murine calvaria, all the ligands and receptors of this family (except EphrA6 receptor and EphrB6 receptor) were found to expressed. These results demonstrate for the first time the expression of ephrins and Eph receptors in bone cells and the regulation of some members of these families in the course of the osteoblast differentiation/maturation.

[0294] No report has previously examined the expression of members of the Eph receptor or ephrin families in the osteoblast cell lineage. The modulation of the expression of several members of these families in either mesenchymal cell lines or primary cells suggest the involvement of these proteins in the process of osteoblast differentiation/maturation. Very interestingly, mice homozygous for a null allele of Ryk (a tyrosine kinase implicated in signalling mediated by Eph receptors) have a distinctive craniofacial appearance, shortened limbs and postnatal mortality due to feeding and respiratory complications associated with a complete cleft of the secondary palate.

[0295] The results reported above indicate a role of the members of this family during bone formation. It is thus particularly interesting to use some probes from the Eph family to define a DNA chip, that may be useful for monitoring osteoporosis (diagnosis, evolution of the disease . . . ).

[0296] It is also interesting to use some members of the family (and especially the receptors) as targets to identify new drugs that interfere with the biological pathway associated with this family, and that can be useful for treating osteoporosis. Methods of screening compounds that are linked to the Eph pathway, and that interfere with the role of Eph proteins during osteogenesis and/or bone loss are particularly interesting, and the compounds thus identified are good candidate for treatment of osteoporosis.

[0297] In another embodiment, preferred nucleic acids according to the invention are part of the receptor-tyrosine kinase of the mammalian Tyro 3 family. Members of this family are descried in particular in Lu et al (Nature 398: 723-728, 1999), Lu et al (Science 293: 306-311, 2001).

[0298] The receptor protein-tyrosine kinases (PTKs) of the mammalian Tyro 3 family include Tyro 3 (SEQ ID No 233, GenBank NM_{—}006293, also named Rse, Sky, Brt, Tif, Dtk, Etk-2) Ax1 (SEQ ID No 231 and 232, GenBank NM_{—}001699 and NM_{—}021913, also named Ark, Ufo, Tyro 7) and Mer (SEQ ID No 234, GenBank

[0299] NM_{—}006343, also named Eyk, Nyk, Tyro 12). These three receptors are widely expressed in adult tissues, but their function is unknown. They share a distinctive structure, with extracellular regions composed of two immunoglobulin-related domains linked to two fibronectin type-III repeats, and cytoplasmic regions that contain an intrinsic PTK domain. Tyro 3, Ax1 and Mer are present in variable amounts in neural, lymphoid, vascular and reproductive tissues, and in primary and tumour cell lines derived from these sources. The kinase activity of each of the receptors is activated by Gas6, a promiscous ligand that exhibits sequence relatedness to a steroid hormone transport protein designated the sex-hormone-binding globulin. Tyro 3 can also bind and be activated by protein S, an anticoagulant in the blood coagulation cascade whose structure is closely related to that of Gas6, although the extent to which protein S functions as a Tyro 3 ligand in vivo is debated.

[0300] The sequence of these proteins may be found on genomic library such as GenBank (www.ncbi.nlm.nih.gov).

[0301] Gas6, the product of the growth arrest-specific gene 6 (Gas6, SEQ ID No 230, GenBank NM_{—}000820), is a new member of the vitamin K-dependent protein family. Proteins belonging to this family are characterized by post-translational-carboxylation of certain glutamic acid residues by a carboxylase, using vitamin K as cofactor. The carboxyglutainic acid (Gla)-containing module in prothrombin, coagulation factors VII, IX and X, protein C, protein Z, protein S and Gas6 allows these vitamin K-dependent plasma proteins to bind to negatively charged phospholipid membranes.

[0302] Apart from a Gla-domain-dependent interaction with phospholipid membranes, Gas6 also binds as a ligand to the receptor tyrosine kinases Ufo, Sky and Mer by its carboxy-terminal globular G domains. It has been implicated in reversible cell growth arrest, survival 1, proliferation and cell adhesion.

[0303] Genetics: Ufo, Sky and Mer triple ko mice display multiple major organ defects and develop autoimmunity with symptoms histologically similar to human rheumatoid arthritis, pemphigus vulgaris (autoimmune disease that affects the skin and mucous membranes), and systemic lupus erythematosus. Females are particularly prone to thromboses and recurrent fetal loss. GAS6 ko mice are protected against arterial and venous thrombosis by enhancing the formation of stable platelet macroaggregates. Partial deletion/mutations of Mer causes retinitis pigmentosa and the rat RCS phenotype (retinal degeneration in which the retinal pigment epithelium (RPE) fails to phagocytose shed outer segments, and photoreceptor cells subsequently die).

[0304] The inventors have observed that Gas6 is significantly upregulated by BMP2 in several of the pre-osteoblast mouse cell lines described in this study (i.e. C2C12, ST2 and MC3T3-E1, FIG. 10) and that gas6 expression is also augmented in maturating primary mouse calvaria cells (FIG. 11) and in maturating NHBC (not shown).

[0305] In an opposed way, Ufo/Ax1 has been found to repressed in by BMP2 in C2C12, C3H10T1/2, ST2 and MC3T3-E1 cells as well as during calvaria cells maturation. When overexpressed in C2C12 or C3H10T1/2 cells, Ufo/Ax1 has been found to repress BMP2 induced Alkaline phosphatase activity. Another gas6 receptor, Sky, has been found to be upregulated during NHBC maturation.

[0306] The different embodiments of the invention (as described above) may be applied to this family, in particular methods of diagnosis, methods of screening for compounds useful for osteoporosis, using these nucleic acids or proteins as targets or in the test, animal models for osteoporosis and bone formation related diseases, DNA arrays for diagnosis comprising probes originating from these genes, pharmaceutical compositions comprising part or all of the proteins, or antibodies against these proteins, for treating osteoporosis, methods and use of these proteins for treating osteoporosis. . .

[0307] The following examples are only as ways of illustration and shall not be considered as restricting the scope of the application.

### EXAMPLES

### Example 1

### Cell Model for Osteopenesis

[0308] Mouse cell lines representing different stages of osteoblastic differentiation, C2C12, C2H10T1/2, ST2 and MC3T3-E1, were grown in the presence of agents capable of the induction of osteoblastic differentiation in vitro such as BMP2 and Sonic Hedgehog or in the presence of TGF beta (negative control) or with serum alone. Primary cells derived from mouse calvaria were also cultured for 0, 2, 7 14 and 21 days and RNA prepared for each time point. For example, C3H10T ½ and C2C12 can be obtained from the ATCC (Manassas, Va., USA) under the collection numbers CCL-226 and CRL-1772, respectively.

[0309] In the case of testing of a compound for its involvement in osteogenesis, said compound can be added to the cells optionally in addition with the BMP2, and the mRNA can be compared in cells with BMP2 alone, with the compound alone, optionally with BMP2 and the compound, or without any external stimuli.

### Example 2

### Harvesting of mRNA and Preparation of cDNA

[0310] Cell extracts for RNA preparation were collected at different time points by using the RNAplus kit provided by Quantum. For every resulting sample, labeled cDNA probe was then generated by reverse transcription followed by in vitro transcription incorporating biotin as part of the standard Affymetrix protocol.

### Example 3

### Determination of the Differential Expression of Genes upon Osteogenesis

[0311] The probes were hybridized in duplicate to the complete series of Affymetrix 35K mouse chips (Mu19KsubA, Mu19KsubB, Mu19KsubC, Mu11KsubA, Mu11KsubB and the chips scanned by laser after hybridization and staining. The final data set consisted in of a total of 580 scan files, each obtained using the GeneChip software, which for each qualifier in the file assigns an intensity which is a measure of the corresponding transcript abundance. The output files were further processed into a format which for each intensity adds an estimate of the standard deviation of the noise (Teilhaber et al, 2000, J. Comp. Biol).

[0312] A list of possible candidates of genes involved in the regulation of osteoblast differentiation and osteogenesis was established with stringent criteria including the repetition of the observed regulation event in several distinct cell lines, the putative biological relevance of the gene and its expression/regulation in primary mouse calvaria cells. From that list 74 candidates were ultimately selected for full length cloning.

[0313] The corresponding human sequences were identified in public data bases with the exception of targets # 13, #60, 61, 62, and # 75, and # 153 that were cloned in-house.

[0314] The cloning of the full cDNAs was performed according to the methods described in example 5. Example 4: brief description of isolation of human candidate genes Human candidate genes were identified from 3 distinct experiments derived from primary human cells. The cells were derived from human bone marrow aspirates or from trabecular bone biopsies. Cells were grown using standard protocols and labeled with two distinct antigens STRO1 and Alkaline phosphatase, reflecting different cell stages towards osteoblastic differentiation. Labeled cells were subjected to Facs purification by cell sorting and RNA extracts prepared from the different purified populations by using the RNAplus kit provided by Quantum.

[0315] For every resulting sample, labeled cRNA probe was then generated by reverse transcription followed by in vitro transcription incorporating biotin as part of the standard Affymetrix protocol.

[0316] The probes were hybridized in duplicate to the complete series of 42K human set of Affymetrix chips (Hu35KA, Hu35 KB, Hu35KC, Hu35 KD, Hu6800. The final data set consisted in of a total of 120 scan files, each obtained using the GeneChip software, which for each qualifier in the file assigns an intensity which is a measure of the corresponding transcript abundance. The output files were further processed into a format which for each intensity adds an estimate of the standard deviation of the noise (Teilhaber et al, 2000, J. Comp. Biol).

[0317] A list of possible candidates was established with stringent criteria including the repetition of the same regulation event in several cell populations. From that list 43 candidates (SEQ ID No 154 to SEQ ID No 196) were ultimately selected for full length cloning.

### Example 5

### Brief Description of the Cloning Methods for Full Length DNA

[0318] These methods are well known by the person skilled in the art and only their principle will be recalled below.

[0319] RT-PCR

[0320] The RT-PCR method employs the selective conversion of an mRNA to first strand cDNA through the use of recombinant reverse transcriptase and then subsequent amplification of the cDNA is achieved through a traditional (PCR) polymerase chain reaction using thermostable (Taq) DNA polymerase. The technique is a common molecular biology technique used to amplify specific cDNA sequences from complex mixtures of RNA using gene specific oligonucleotides to prime first strand cDNA synthesis.

[0321] Gene Trapper Positive cDNA Selection

[0322] The Gene Trapper Positive cDNA Selection (LifeTechnologies) is a method which captures specific cDNA clones through solution hybridization of a biottinylated gene-specific oligonucleotide to a single stranded plasmid DNA preparation and subsequent selection with paramagnetic beads. In this method, an oligonucleotide, complimentary to a defined sequence of the target cDNA is biotinylated at the 3′ end. The biotinylated oligonucleotide is added to a complex mixture of single strand cDNA clones. Specific hybridization between the biotinylated oligonucleotide and the single strand cDNA clone is formed in solution and then captured on streptavidin coated paramagnetic beads. A magnet is used to retrieve the beads from solution with the target cDNA clone attached. The technique is widely used and efficient method to enrich for desired cDNA clones from complex mixtures of library cDNA.

[0323] 5′ RACE

[0324] The 5′ Rapid Amplification of cDNA Ends (RACE) is technique typically employed to clone full length cDNA sequences when only a partial cDNA sequence is initially available. The method typically which employs anchored PCR between a defined sequence within an mRNA and the 5′ end of the mRNA transcript. A unique gene-specific oligonucleotide is used to prime first strand cDNA synthesis from either mRNA source for subsequent PCR amplification. A defined sequence is then added to the 3′ end of the first strand cDNA by tailing with recombinant Terminal Deoxynucleotidyl Transferase (rTdT) or by ligation of an oligonucleotide adapter. Direct amplification of the cDNA between the adapter and gene specific oligonucleotide is achieved through a traditional (PCR) polymerase chain reaction using thermostable (Taq) DNA polymerase.

### Example 6

### Screening of Drugs Modulating the Expression of the Genes in the Invention in Particular in the Model of Example 1

[0325] The invention also features a method of screening candidate compounds for the ability to modulate the effective local or systemic concentration or level of a protein according to the invention in an organism.

[0326] The method is practiced by

[0327] a) incubating one or more candidate compound(s) with cells from a test tissue type of an organism, or in a cell model of osteogenesis, known to produce said given protein for a time sufficient to allow the compound(s) to affect the production, i.e., expression and/or secretion, of said protein by the cells;

[0328] b) and then assaying cells and the medium conditioned by the cells for a change in a parameter indicative of the level of production of the protein.

[0329] The procedure may be used to identify compounds showing promise as drugs for human use capable of increasing or decreasing production of said protein according to the invention in vivo, thereby to correct or alleviate a diseased condition.

[0330] Preferred methods for determining the level of or a change in the level of a protein according to the invention in a cultured cell include using an antibody specific for said protein, e.g., in an immunoassay such as an ELISA or radioimmunoassay; and/or determining the level of nucleic acid, most particularly mRNA, encoding the protein using a nucleic acid probe that hybridizes under stringent conditions with the protein RNA, such as in an RNA dot blot analysis.

[0331] Where a change in the presence and/or concentration of the protein of the invention is being determined, it will be necessary to measure and compare the levels of protein in the presence and absence of the candidate compound.

[0332] The nucleic acid probe may be a nucleotide sequence encoding the protein or a fragment large enough to hybridize specifically only to RNA encoding a specific protein under stringent conditions, i.e. conditions in which non-specific hybrids will be eluted but at which specific hybrids will be maintained.

[0333] The screening method of the invention provides a simple method of determining a change in the level of a protein of the invention, or the level of mRNA production as a result of exposure of cultured cells to one or more compound(s).

[0334] The level of said protein in a given cell culture, or a change in that level resulting from exposure to one or more compound(s) indicates that direct application of the compound modulates the level of the protein expressed by the cultured cells. If, for example, a compound upregulated the production of a protein according to the invention, that had been shown as being up-regulated in the osteogenesis cell line model as described in example 1 upon stimulation with BMP2, it would then be desirable to test systemic administration of this compound in an animal model to determine if it upregulated said protein in vivo, and/or promotes osteogenesis in vivo.

[0335] If this compound did upregulate the endogenous circulating levels of said protein, it would be consistent with administration of the compound systemically for the purpose of correcting bone metabolism diseases such as osteoporosis, preventing some form of bone degeneration and/or restoring the low density bone to its normal healthy level.

[0336] It is important to note that the level of any protein according to the invention in the body may be a result of a wide range of physical conditions, e.g., tissue degeneration, or also as a result of the normal process of aging.

[0337] The assay of the invention therefore involves screening candidate compounds for their ability to modulate the effective systemic or local concentration of a protein according to the invention by incubating the compound with a cell culture that has been shown to modulate the level of production of said protein under osteogenesis conditions, and assaying the culture for a parameter indicative of a change in the production level of the protein.

[0338] Useful candidate compounds then may be tested for in vivo efficacy in a suitable animal model. These compounds then may be used in vivo to modulate effective protein concentrations in the disease treatment.

[0339] The methods for assessing protein production are described in examples 7 and 8.

### Example 7

### Northern Blot

[0340] Using specific oligonucleotides probes, transcripts can be identified in mammalian tissues, using standard methodologies well known to those having ordinary skill in the art.

[0341] Briefly, total RNA from mouse embryos and organs from post-natal animals is prepared using the acid guanidine thiocyanate-phenolchloroform method (Chomczynski et al., Anal. Biochem. 162:156-159, 1987).

[0342] The RNA may be dissolved in TES buffer (10 mM Tris-HCl, 1 mM EDTA, 0.1% SDS, pH 7.5) and treated with Proteinase K (approx. 1.5 mg per g tissue sample) at 45° C. for 1 hr Poly(A) RNA selection on oligo(dT)-cellulose (Type 7, Pharmnacia LKB Biotechnology Inc., Piscataway, N.J.) may be done in a batch procedure by mixing 0.1 g oligo(dT)-cellulose with 11 ml RNA solution (from 1 g tissue) in TES buffer and 0.5M NaCl). Thereafter the oligo(dT) cellulose is washed in binding buffer (0.5M NaCl, 10 mM Tris-HCl, 1 mM EDTA, pH 7.5) and poly(A)⁺ RNA is eluted with water. Poly(A)⁺ RNA (5 or 15 μg/lane) is fractionated on 1 or 1.2% agarose-formaldehyde gels (Selden, in Current Protocols in Molecular Biology, Ausubel et al. eds., pp. 1-4, 8, 9, Greene Publishing and Wiley-Interscience, New York, 1991). 1 μl of 400 μg/ml ethidium bromide is added to each sample prior to heat denaturation (Rosen et al., Focus 12:23-24, 1990). Following electrophoresis, the gels are photographed and the RNA is blotted overnight onto Nytran nitrocellulose membranes (Schleicher & Schuell Inc., Keene, N.M.) with 10×SSC. The membranes are baked at 80° C. for 30-60 min and irradiated with UV light (I mW/cm² for 25 sec). The Northern hybridization conditions may be as previously described (Ozkaynak et al., EMBO J. 9:2085-2093, 1990). For re-use, the filters may be deprobed in 1 mM Tris-HCl, 1 mM EDTA, 0.1% SDS, pH 7.5, at 90-95° C. and exposed to film to assure complete removal of previous hybridization signals.

[0343] This leads to a semi-quantitative data, that can be useful to determine the differential expression of the protein of the invention.

### Example 8

### Determination of the Level of a Protein Coded by One of SEQ ID No 1 to SEQ ID No 150, SEQ ID No 151, SEQ ID No 152. SEQ ID No 153 and SEQ ID No 154 to SEQ ID No 196, or SEQ ID No 197 to SEQ ID No 210, or SEQ ID No 211 to SEQ ID No 229 or SEQ ID No No 234, or SEQ ID No 235 to SEQ ID No 245

[0344] The level of protein production by the chosen cell type is determined with and without incubating the cell in culture with the compound, in order to assess the effects of the compound on the cell's ability to synthesize or secrete the protein. This can also be accomplished by a direct detection of the level of production of the protein.

[0345] Samples for testing the level of protein production include culture supernatants or cell lysates, collected periodically and evaluated for production by immunoblot analysis of a portion of the cell culture itself, collected periodically and used to prepare polyA⁺ RNA for RNA analysis (Sambrook et al., eds., Molecular Cloning, 1989, Cold Spring Harbor Press, Cold Spring Harbor, N.Y.).

[0346] To monitor de novo protein synthesis, some cultures are labeled with ³⁵S_methionine/³⁵S-cysteine mixture for 6-24 hours and then evaluated for protein production by conventional immunoprecipitation methods (Sambrook et al., eds., Molecular Cloning, 1989, Cold Spring Harbor Press, Cold Spring Harbor, N.Y.). Alternatively, the production of protein or detemination of the level of protein production may be ascertained using a simple assay for a parameter of cell growth, e.g., cellular proliferation or death. For example, where a protein is produced by a cultured cell line, the addition of antibody specific for said protein may result in relief from protein inhibition of cell growth. Thus, measurement of cellular proliferation can be used as an indication of protein production by a tissue.

[0347] In order to quantify the production of a specific protein by a cell type, an immunoassay may be performed to detect said protein using a polyclonal or monoclonal antibody specific for that protein (see Examples 9 and 10).

[0348] 1 μg/100 μl of affinity-purified polyclonal rabbit IgG specific for the protein of the invention is added to each well of a 96-well plate and incubated at 37° C. for an hour. The wells are washed four times with 0.16M sodium borate buffer with 0.15M NaCl (BSB), pH 8.2, containing 0.1% Tween 20. To minimize non-specific binding, the wells are blocked by filling completely with 1% bovine serum albumin (BSA) in BSB for 1 hour at 37° C. The wells are then washed four times with BSB containing 0.1% Tween 20. A 100 μl aliquot of an appropriate dilution of each of the test samples of cell culture supernatant is added to each well in triplicate and inctibited at 37° C. for 30 min. After incubation, 100′; blotnylated rabbit anti-protein serum (stock solution is about 1 mg/ml and diluted 1:400 in BSB containing 1% BSA before use) is added to each well and incubated at 37° C. for 30 min. The wells are then washed four times with BSB containing 0.1% Tween 20. 100 μl strepavidin-alkaline (Southern Biotechnology Associates, Inc. Birmingham, Ala., diluted 1:2000 in BSB containing 0.1% Tween 20 before use) is added to each well and incubated at 37° C. for 30 min. The plates are washed four times with 0.5M Tris buffered Saline (TBS), pH 7.2. 50 μl substrate (ELISA Amplification System Kit, Life Technologies, Inc., Bethesda, Md.) are added to each well incubated at room temperature for 15 min. Then, 50 μl amplifier (from the same amplification system kit) is added and incubated for another 15 min at room temperature. The reaction is stopped by the addition of 50 μl 0.3M sulphuric acid. The OD at 490 nm of the solution in each well is recorded. To quantitate protein in culture media, a standard curve is performed in parallel with the test samples.

### Example 9

### Preparation of Polyclonal Antibodies

[0349] Polyclonal antibody is prepared as follows. Each rabbit is given a primary immunization of 100 μg/500 μl recombinant protein of the invention in 0.1% SDS mixed with 500 μl Complete Freund's Adjuvant. The antigen is injected subcutaneously at multiple sites on the back and flanks of the animal. The rabbit is boosted after a month in the same manner using incomplete Freund's Adjuvant. Test bleeds are taken from the ear vein seven days later.

[0350] Two additional boosts and test bleeds are performed at monthly intervals until antibody against the protein of the invention is detected in the serum using an ELISA assay. Then, the rabbit is boosted monthly with 100 μg of antigen and bled (I 5 ml per bleed) at days seven and ten after boosting.

### Example 10

### Preparation of Monoclonal Antibodies

[0351] Monoclonal antibody specific for a given protein of the invention may be prepared as follows. A mouse is given two injections of recombinant protein of the invention. The first injection contains 100 μg of said protein in complete Freund's adjuvant and is given subcutaneously. The second injection contains 50 μg of the protein in incomplete adjuvant and is given intraperitoneally. The mouse then receives a total of 230 μg of protein in four intraperitoneal injections at various times over an eight month period. One week prior to fusion, the mouse is boosted intraperitoneally with 100 μg of protein. This boost is repeated five days (IP), four days (IP), three days (IP) and one day (IV) prior to fusion. The mouse spleen cells are then fused to myeloma (e.g., 653) cells at a ratio of 1:1 using PEG 1500 (Boehringer Mannheim), and the cell fusion is plated and screened for specific antibodies using recombinant protein or peptides derived from said protein as antigen. The cell fusion and monoclonal screening are according to procedures widely available in the art. The neutralizing monoclonal is identified by its ability to block the biological activity of the protein when added to a cellular assay which responds biologically to added protein.

### Example 11

### Compounds to Test According to the Invention

[0352] The screening methods of the invention is used to test compounds for their effect on the production of morphogenic protein by a given cell type. Examples of compounds which may be screened include but are not limited to chemicals, biological response modifiers (e.g., lymphokines, cytokines, hormones, or vitamins), plant extracts, microbial broths and extracts medium conditioned by eukaryotic cells, body fluids, or tissue extracts.

### Example 12

### Double Hybrid Assay

[0353] The double hybrid assay is intended to find the binding partners of a given protein. It may be performed on any protein coded by one of SEQ ID No 1 to SEQ ID No 196 in a system derived from Finley and Brent (Interaction trap cloning with yeast, 169-203, in DNA Cloning, Expression Systems: a practical Approach, 1995, Oxford Universal Press, Oxford), using said protein as a bait and a cDNA library to find the preys.

[0354] The protein bait is cloned in plasmid pEG202 known from the person skilled in the art for such a purpose (promoter 67-1511, lexA 1538-2227, ADH Ter 2209-2522, pBR remnants 2540-2889, 2μ ori 2890-4785, YSCNFLP 4923-5729, HIS3 7190-5699, TYIB 7243-7707, RAF_part 7635-7976, pBR backbone 7995-10166, bla 8131-8988).

[0355] cDNA of the library are cloned in plasmid pJG4-5, also well known by the person skilled in the art (promoter GAL 1-528, fusion cassette 528-849, ADH Ter 867-1315, 2μ orn 1371-3365, TRP1 3365-4250, pUC backbone 4264-6422, Ap 4412-5274).

[0356] Reporting plasmid pSH18-34 is also used. It is in particular available from Invitrogen, under reference number V611-20, et may also already be introduced in strain EGY48 (also called RFY 231), in the same supplier (reference strain alone: C835-00, transformed by pSH18-34: C836-00)

[0357] The binding is demonstrated in yeast strain RFY 231 (described in Finley Jr, et al, 98, Proc Natl Acad Sci USA, 95, 14266-71). This yeast strain harbors the following genotype (MATcc Irp1Δ::hisG his3 ura3-1 leu2::3Lexop-LEU2), and is derived from EGY48 (Guris et al., 1993, Cell, 75, 791-803).

[0358] The reporting gene is LacZ.

[0359] The study is performed on a medium containing galactose, no leucine, and the presence of colored colonies on the plates is studied.

### Example 13

### In Vitro Validation of Some Targets

[0360] The candidates genes are cloned in expression vectors and their ability to express a protein of the expected size verified by COS cells transient transfection. The genes are then transfected in C3H10T1/2 cells and/or C2C12 cells (transient over-expression) and positive or negative cooperation with BMP2 is evaluated by the measurement of alkaline phosphatase (enzymatic assay and TaqMan) at 48 hours. Controls of positive cooperation, recombinant Sonic Hedgehog, or negative cooperation, recombinant Noggin, are included in each test.

[0361] The following sequences have shown effects in the above described test, at 48th:

| | | Validation in | |
|---|---|---|---|
| SEQ ID No | Name | C2H10T1/2 | Status |
| 7 | SLP1 | + coop over BMP2 | confirmed |
| 9 | P85 | − coop over BMP2 | confirmed |
| 11 | fibromodulin | − coop over BMP2 | confirmed |
| 28 | Meltrin beta | − coop over BMP2 | confirmed |
| 31 | Stomatin/EBP72 | − coop over BMP2 | confirmed |
| 46 | Edg1 | + coop over BMP2 | confirmed |
| 47 | Prostaglandin E | + coop over BMP2 | confirmed |
| | receptor (EP4) | | |
| 48 | Vzg1/Edg2 | + coop over BMP2 | Confirmed |
| 65 | Sprouty | + coop over BMP2 | confirmed |

[0362] For targets 46 and 48, a HTS program based on the use of cell lines expressing edg1 or edg2 has been initiated. For Sprouty (target 65) a search for a partner protein is ongoing with a Yeast-2-Hybrids approach.

### Example 14

### In Vitro Validation of Some Targets

[0363] Cells were obtained from the calvariae of neonatal mice 1-2 days after birth by sequential collagenase digestion at 37° C. The cells released between 20-40 minutes of collagenase digestion were collected and cultured in proliferation medium (DMEM supplemented with 20% FCS and 2 mM glutamine) until 80% confluence (time 0) and proliferation medium was replaced by differentiation medium (aMEM containing 10% FCS, 2 mM glutamine, 50 microg/ml ascorbic acid and 10 mM beta-glycerolphosphate). Total RNAs were extracted at days 0, 2, 7, 14, and 21 and labeled cRNA probes were generated by reverse transcription followed by in vitro transcription incorporating biotin labeling, according to the standard Affymetrix protocol.

[0364] The following sequences have shown effects in the tests describes in Examples 13 and 14:

| | | Validation in vitro | | Regulation in other | |
|---|---|---|---|---|---|
| SEQ | | (coop over BMP2) | | models | |
| ID No | Name | C3H10T1/2 | C2C12 | Calvaria | NHBC/BMSC |
| 2 | TSC-36 (Fstl) | | | down | Up NHBC |
| 5 | SFRP2 | −coop over | | Up/down | |
| | | Wnt3a | | | |
| 6 | PEDF | | | | Up in NHBC |
| 7 | SLP1 | + | | Up | |
| 9 | P85 | + | | down | Up in NHBC |
| 11 | fibromodulin | − | − | down | Up in NHBC |
| 12 | osteomodulin | | | | Down NHBC |
| 16 | Fisp12/CTGF | | | down | Up NHBC & |
| | | | | | BMSC |
| 23 | ADAMTS-1 | | | down | Down NHBC |
| 24 | Cystatin c | − | | Up | Up NHBC |
| | | | | | Down BMSC |
| 26 | BMP1 | − | | down | Up NHBC |
| 27 | Na + K ATPase | | | Up | Up NHBC |
| | Beta3 subunit | | | | |
| 28 | Meltrin beta | − | − | | |
| 30 | Metalloproteinase | − | − | | Up NHBC |
| | 14 | | | | |
| 31 | Stomatin/EBP72 | − | | | Down NHBC |
| 32 | NOV | | | up | Down NHBC |
| 34 | biglycan | | | down | Up NHBC |
| 35 | Fibulin-4 | | | down | Up NHBC |
| 36 | Annexin II | | | down | Up NHBC |
| 37 | Tyr kinase UFO | − | − | down | |
| 40 | Bone marrow | | | up | Up in NHBC |
| | stromal antigen2 | | | | |
| 41 | Macrophage | | | down | Up in NHBC |
| | mannose receptor | | | | |
| | typec | | | | |
| 42 | Mac2 antigen/ | − | − | up | Up NHBC |
| | galectin 3 | | | | Down BMSC |
| 43 | KIAA0620 | | | up | Up NHBC |
| 45 | Taurine/beta- | − | | up | |
| | alanine transporter | | | | |
| 46 | Edg1 | + | | | |
| 47 | Prostaglandin E | + | | | |
| | receptor (EP4) | | | | |
| 48 | Vag1/Edg2 | + | | | Up NHBC |
| 49 | Frizzled 1 | − | − | | Up NHBC |
| 51 | Pkd2 | | | down | Down NHBC |
| 53 | AEBP1 | | | down | Up NHBC |
| | | | | | Down BMSC |
| 54 | Mevalonate kinase | | | | Up NHBC & |
| | | | | | BMSC |
| 55 | MSP23/Osf3 | − | − | up | |
| 56 | FKBP65/63 | − | | down | Down BMSC |
| 57 | Nedd4-like | | | down | Up NHBC |
| 58 | TSC-22 | | | | Up NHBC & |
| | | | | | BMSC |
| 63 | Similar to gene 33 | − | − | down | |
| 64 | HMR/NUR77 | | | | Up NHBC |
| 65 | Sprouty | + | | | |
| 67 | Similar alpha- | − | | | Down |
| | actinin-2- | | | | NHBC & |
| | associated | | | | BMSC |
| 68 | SOCS3 | − | − | down | |

[0365] For target 65 (Sprouty) the positive cooperation observed over BMP2 was confirmed by an anti-sense approach, i.e. in the presence of the anti-sense oligo the positive cooperation was abolished.

The application's sequence listing, which the Patent Office published only in electronic form, follows.

SEQUENCE LISTING (246 sequences)

SEQ ID NO: 1 - DNA, 1543 bp, Mus musculus
gcacgaggggatcctgccagccgcgaccccagccttcgccgtcgccgcctagggcgccccaggccgcaccatggtgaaggtgacgttcaactcggcgctggcccagaaggaggccaagaaggacgagcccaagagcagcgaggaggcgctcatcgtccctccggatgccgtggcggtggattgcaaggacccgggtgacgtggttccggttggacagaggagagcgtggtgttggtgcatgtgtttcggactggccttcatgcttgctggcgtcatcctcggaggggcgtacctgtacaagtattttgctcttcagccagatgatgtgtactactgtggactaaagtacatcaaagatgacgtcatcctgaacgagccttctgcggatgccccagctgctcgctaccagacaattgaagagaacattaagatctttgaggaagacgcagtggaattcatcagtgtgcctgtaccagagtttgcggacagcgatcctgccaacattgtgcacgacttcatcaagaaactcactgcttatttggaccttaacctggacaagtgctacgtgattcctctgaacacttccatcgttatgccgcccaaaaacctgctggagctccttattaacattaaggccgggacctacctgcctcagtcctaccttatccatgagcacatggtgatcaccgaccgcatcgagaacgtggacaacctgggcttcttcatctaccgactgtgtcacgacaaggagacctacaaactgcagcgccgggaaacaattagaggtattcagaagcgggaagccagtaactgtttcaccattcggcattttgagaacaaatttgctgtggagactttaatttgttcttgagaagtcaagaaaaaacgtggggaggaattcaatgccacagcataccctacccctttgtattttgtgcagtgattgttttttaaaatcttcttttcatgtaagtagcaaacagggcttcactgtctcttcatctcaataactcaattaaaaaccattatcttaaaaaaagaaaacaaaacctttcttttttctaagtgtggtgtctttgatgtttgaattagcaaatgtgcaggttcctagataagattcgcttctccttagagcttacctactaggaagaatctaaattgcttggaaatcactaatctggatttttgtgttaattctgcacttccatgagggaaagatgcctaaagaatagtcattcgcatatgttaaagggaccacagtgatttgcttgtagatgctagccctgctacctagtctgttagcatttgaagtcaccttctcatactactttaattaaaatgtgccgtatcttcaatgttgctttaactactttagaggatttcagccttgatgttttaatatcctaggcctctgctgtaataagattttagacaaatgtttggaatttaagaagcaactcatgttactaatttgtatagcccatatctgtggaatggaatataaatatcacaaagcccaaaaaaaaaaaaaaaaaaaaaaaaa

SEQ ID NO: 2 - DNA, 930 bp, Mus musculus
gcatatgtggaaacgatggctggcgctctcgctggtgaccatcgccctggtccacggcgaggaggaacctagaagcaaatccaagatctgcgccaatgtgttttgtggagctggcagggaatgtgccgtcacagagaagggggagcccacgtgcctctgcattgagcaatgcaaacctcacaagaggcctgtgtgtggcagtaatggcaagacctacctcaaccactgtgaacttcatagagatgcctgcctcactggatccaagatccaggttgattatgatgggcactgcaaagaaaagaagtctgcaagtccatctgccagcccagttgtctgctatcaagctaaccgcgatgagctccgacggcgcctcatccagtggctggaagctgagatcattccagatggctggttctctaaaggcagtaactacagtgagatcctagacaagtactttaagagctttgataatggcgactctcacctggactccagtgaattcctgaaattcgtggagcagaatgaaacagccatcaacatcaccacttatgcagatcaggagaacaacaaactgctcagaagcctctgtgttgacgccctcattgaactgtctgatgagaacgctgactggaaactcagcttccaagagttcctcaagtgcctcaacccatcctttaacccttctgagaagaagggggccctggaggacgaaacctatgcagatggagctgagactgaaggggactgcaatcgctgtgtctgttcctggggccactgggtctgcacagcaatgacctgtgatggaaagaatcaaaagggggtcccgacccaccccgaggaggagaagacaggatatgtccaggaacttcaaaagcaccagggcccagcagaaaagaccaagaaggggaacccccaagagatctaacatat

SEQ ID NO: 3 - DNA, 441 bp, Mus musculus
gctctagagatcttgtccacaatgagcctccagctccgcagctccgcccacatccccagcggttccagctcgccattcatgcggatggcgccgctggcatttctgttgctgttcacgctgccgcagcatctagctgaagctgccccttcctcagtcatagccgcaacggagctgcgttgtgtttgcttaaccgtaactccaaaaattaatcccaaattgatcgctaatttggaggtgatccctgcaggtccacagtgccctacggtggaagtcatagctaaactgaaaaaccagaaggaggtctgtctggatccagaagctcctgtgataaagaaaatcattcagaaaatattgggcagtgacaaaaagaaagctaagcggaatgcactcgcagtggaaagaacggccagtgttcaatagaaagatttctgagagatctgc

SEQ ID NO: 4 - DNA, 1169 bp, Mus musculus
gcacgagttttccttcctagattgcagagctttcatatccacgatgcgttttctggccgccacgatcctgctgctggcgctggtcgctgccagccaggcggagcccctgcacttcaaggactgcggctctaaggtgggagttataaaggaggtgaatgtgagcccatgtcccaccgatccctgtcagctgcacaaaggccagtcctacagtgtcaacatcacctttaccagcggcactcagtcccagaacagcacggccttggtccacggcatcctggaagggatccgggtccccttccctattcctgagcctgacggttgtaagagtggaatcaactgccccatccagaaagacaaggtctacagctacctgaataagcttccggtgaagaatgaatacccctctataaaactggtggtggaatggaaacttgaagatgacaaaaagaataatctcttctgctgggagatcccagttcagatcacaagctaggctccttggcgcctgtgtctgtgtgggctgagaggccatggacggagtgggggggaagaaacagaaatcagacccgaaatggaatcagtgccatatgatgaacagaatttcaagaatgctgttttatgccttttaacctccaaagcagtacctgcaagcctactactcttgagagcgcgctcagagccattgtcccccgagatagcctctggggaggcttcgggagggaaaggggaaactggaaagattagattggtgtccatggctgtttgctgttggattacaggcaggttccaccagacaggatgggacagggttgcttagggatgtcagataacttgacccagggctatggatccactgtgaaggatggcttcccagagtcttctggctgcctgggggtgttacctcccctgtttctaagtgcctcctgagtccccagcccctggcttatcagtcagatgagtctccttggtagcctctgccccatcgcttcagcagtagcgactagctctcctcggtatccagactggctgaggggcagtctgccgcagaaatttgtctctgagtggctgtgtctttgtggttagctctcgttctttggtagttttcattaaagccaatacttggttgcaaaaaaaaaaaaaaaaaaaaaaaaaaaaaaaaaaaaaaaaaa

SEQ ID NO: 5 - DNA, 926 bp, Mus musculus
gctctagacgctagtccacgatgccgcggggccctgcctcgctgctgctgctagtcctcgcctcgcaccgctgcctgggctcggcgcgtgggctcttcctcttcggccagcccgacttctcctacaagcgcagcaactgcaagcccatccccgccaacctgcagctgtgccacggcatcgagtaccagaacgtgcggctgcccaacctgctgggccacgagaccatgaaggaggtgctggagcaggcgggcgcctggattccgctggtcatgaagcagtgccacccggacaccaagaagttcctgtgctcgctcttcgcccctgtctgtctcgacgacctagatgagaccatccagccgtgtcactcgctctgcgtgcaggtgaaggaccgctgcgccccggtcatgtccgccttcggcttcccctggccagacatgctggagtgcgaccgtttcccgcaggacaacgacctctgcatccccctcgctagtagcgaccacctcctgccggccacagaggaagctcccaaggtgtgtgaagcctgcaaaaccaagaatgaggacgacaacgacatcatggaaaccctttgtaaaaatgacttcgcactgaaaatcaaagtgaaggagataacgtacatcaacagagacaccaagatcatcctggagacaaagagcaagaccatttacaagctgaacggcgtgtccgaaagggacctgaagaaatccgtgctgtggctcaaagacagcctgcagtgcacctgtgaggagatgaacgacatcaacgctccgtatctggtcatgggacagaagcagggcggcgagctggtgatcacctccgtgaaacggtggcagaagggccagagagagttcaagcgcatctcccgcagcatccgcaagctgcaatgctagtttcccagtgggatccgc

SEQ ID NO: 6 - DNA, 1271 bp, Mus musculus
agttccgggatgcaggccctggtgctactcctctggactggagccctgctcgggcacggcagcagccagaacgtccccagcagctctgagggctccccagtcccggacagcacgggcgagcccgtggaggaggaggaccccttcttcaaggtccctgtgaacaagctggcagcagctgtctccaacttcggctacgatctgtaccgcctgagatccagtgccagcccaacgggcaacgtcctgctgtctccactcagcgtggccacggccctctctgccctttctctgggagctgaacatcgaacagagtctgtcattcaccgggctctctactacgacctgatcaccaaccctgacatccacagcacctacaaggagctccttgcctctgttactgcccctgagaagaacctcaagagtgcttccagaattgtgtttgagaggaaacttcgagtcaaatccagctttgttgcccctctggagaagtcctatgggaccaggccccggatcctcacgggcaaccctcgagtagaccttcaggagattaacaactgggtgcaggcccagatgaaagggaagattgcccggtccacgagggaaatgcccagtgccctcagcatccttctccttggcgtggcttacttcaaggggcagtgggtaaccaagtttgactcgagaaagacgaccctccaggattttcatttggacgaggacaggaccgtgagagtccccatgatgtcagatcctaaggccatcttacgatacggcttggactctgatctcaactgcaagattgcccagctgcccttgacaggaagtatgagcatcatcttcttcctgcccctgaccgtgacccagaacttgaccatgatagaagagagcctcacctctgagttcattcatgacatcgaccgagaactgaagactatccaagctgtgctgactgtccccaagctgaagctgagcttcgaaggcgaacttaccaagtctctgcaggacatgaagctacagtcgttgtttgaatcacccgacttcagcaagattactggcaaacccgtgaagctcacccaagtggaacacagggctgctttcgagtggaatgaagagggggcaggaagcagccccagcccaggcctccagcccgtccgcctcaccttcccgctagactatcaccttaaccaacctttcctctttgttctgagggacacggacacgggggccctcctcttcataggcagaatcctggaccccagtagcacttaatgtctcag

SEQ ID NO: 7 - DNA, 409 bp, Mus musculus
aatctagaatgaagtcctgcggccttttacctttcacggtgctccttgctctggggatcctggcaccctggactgtggaaggaggcaaaaatgatgctatcaaaatcggagcctgccctgctaaaaagcctgcccagtgccttaagcttgagaagccacaatgccgtactgactgggagtgcccgggaaagcagaggtgctgccaagatgcttgcggttccaagtgcgtgaatcctgttcccattcgcaaaccagtgtggaggaagcctgggaggtgcgtcaaaactcaggcaagatgtatgatgcttaaccctcccaatgtctgccagagggacgggcagtgtgacggcaaatacaagtgctgtgagggtatatgtgggaaagtctgcctgcccccgatgactagtaa

SEQ ID NO: 8 - DNA, 361 bp, Mus musculus
aatctagaatgaagtgcggcgtgtgtctgtgcgtggtgatggcagtcctagctgctggcgccctggcgcagccggtagtccctgcagaagctacggaccccgtggagcagcgggcgcaagaggcgccccgaaggcagctgcgggctgtgctccggacggacggcgagccccgagcgcgcctgggcgcactgctagcccgatacatccagcaggtccgcagagctccttctggccgcatgtccgttcttaagaacctgcagagcctggaccccagccatagaataagtgaccgggactacatgggctggatggatattggccggcgcagtgccgaggactacgaatacccatcgactagtaa

SEQ ID NO: 9 - DNA, 1693 bp, Mus musculus
aatctagaatggggaccgtatccagagcagccttgatcttggcctgcttggctcttgcttctgctgcctctgagggagccttcaaggcttcagaccagcgagagatgacgccagagcgcctcttccagcacctccatgaagtaggttatgcagcacccccttccccaccacaaacccggagactccgagttgaccactctgtaacttctctgcatgaccctcccctctttgaggaacaaagagaagtgcagcccccttcctctccagaagacatccctgtgtacgaggaagactggcccactttcctaaaccctaatgtagataaagctggtcctgctgtccctcaagaagccatccccctgcagaaagagcagccccctccccaagtccatattgaacagaaggaaatagacccgcctgcccagcctcaggaggagattgtccagaaagaggtgaagccacacaccttggcgggccagctccctccagagccccggacttggaatccagcccgtcactgccagcagggacggagaggtgtctggggccaccggctggatggcttccctcctggacggccttctccagacaatctgaagcagatctgccttcctgagcgtcagcatgtgatctacggcccctggaacctgccgcagactggctactctcaccttagtcgccagggagagaccctcaatgtgctggagaccggatactcccgctgctgtcgctgccgcagcgacacaaaccgcctagactgtttgaagcttgtgtgggaggatgcaatgacccaattttgtgaggccgaattctctgtcaagacccgcccccacctgtgctgcagactgcgtggggaggagcgattctcttgcttccagaaggaagctcctcgcccagactacctgctccgaccctgccccgtccaccagaatggcatgtcctcagggccccagttgcctttccccccggggttgcccacaccggacaatgtcaaaaacatctgtctcctgagacgcttccgcgccgtgccacgcaacctcccagctactgacgccatccagaggcagctgcaggctctgactcggctggagacggagttccagcgctgctgccgccagggccacaaccacacttgcacatggaaggcctgggagggtaccctggatggatactgcgagcgggagctggctataaagacccacccccactcgtgctgccactaccctcctagtcctgcccgtgatgagtgcttcgcccacctagctccctatcccaactatgaccgggatatcttgacccttgacctcagccgagtcacccccaacctcatgggccagctctgtggaagtggaagggtccttagcaagcataaacagattccggggctgatccagaatatgaccgtccgctgctgcgagcttccatatccagaacaggcctgctgcggcgaagaggagaaactggccttcatcgagaacctctgtggtccccggaggaattcgtggaaagaccctgccctctgctgtgacctgtctcctgaagataagcaaatcaactgcttcaataccaactacctgaggaacgtggctttagtggctggagacactgggaatgccactggcttgggggagcagggcccaactcggggaacagatgccaaccccgcccctgggtccaaggaagaaactagtaa

SEQ ID NO: 10 - DNA, 1024 bp, Mus musculus
aagatatcatggccatggcccggtccaggagggactctgtgtggaagtactgttggggacttttgatggttttgtgcagaactgcgatctccagatcgatagttttagagcctatctactggaattcctcgaactccaaatttctacccggacaaggcctggtactatacccacagataggagacaaattggatattatttgccccaaagtggactctaaaactgttggccagtatgaatattataaagtttatatggttgataaagaccaagcagacagatgcacaattaagaaggagaataccccgctgctcaactgtgccagaccagaccaagatgtgaaattcaccatcaagtttcaagaattcagccctaacctctggggtctagaatttcagaagaacaaagattactacattatatctacatcaaatgggtctttggagggcctggataaccaggagggaggggtgtgccagacaagagccatgaagatcctcatgaaagttggacaagatgcaagttctgctggatcagccaggaatcacggtccaacaagacgtccagagctagaagctggtacaaatgggagaagttcaacaacaagtccctttgtgaagccaaatccaggttctagcaccgatggcaacagcgcggggcattccgggaacaatctcctgggttccgaagtggccttattcgcagggatcgcatcaggatgcatcatcttcatcgtcatcatcatcactttggtggtgctgctgctcaagtaccgcaggagacaccgcaaacactctccacagcacacgaccacgctgtctctcagcacactggccacgcccaagcgaggtggcaacaacaatggctcggagcccagtgacgttatcataccactaaggactgcagacagcgtcttctgcccgcactacgagaaggtcagcggggactatgggcacccggtgtacatcgtgcaggagatgcccccacagagtcctgccaacatttactacaaggtcactagtaa

SEQ ID NO: 11 - DNA, 1144 bp, Mus musculus
aatctagaatgcagtgggcctccgtcctgctgctggctgggctctgctcactttcccagggccagtatgatgaagactctcactggtggatccaatacctccgaaaccagcagtccacctactacgacccctatgacccttacccctatgagccctctgagccttacccctatggagtggaagaaggcccagcctatgcctatggtgcaccacctccaccagagccccgtgattgtccccaagaatgcgactgtccccccaacttccccacagccatgtactgtgacaaccgcaacctcaagtacctgccttttgtgccctcccgcatgaagtacgtctacttccagaacaaccagatctctgccatccaggaaggtgtctttgacaatgccactgggctcctctgggtcgctctacatggcaaccagattaccagtgacaaggtaggcaggaaagtcttctccaagctgaggcacttggagaggctgtacttggaccacaacaacctgacccggatgcccggcccgctgccccgatccctgagagagctccacctggaccacaaccagatctcacgggtccccaacaatgctttggagggcctggagaacctcacggccttatatctccaccacaatgagatccaggaagtggggagttccatgagaggcctccggtccctgatcctactagacctgagttataaccaccttcggagggtacccgacggtctgccctcagccctggagcagctgtacctagaacacaacaatgtctacaccgtccctgacagctacttccgggggtcacccaagctgctgtacgtccggttgtctcacaacagtctcactaacaacggccttgctaccaacaccttcaactccagcagccttcttgagctagacttgtcttacaatcagctgcagaagatccctcctgtcaacaccaacctggagaatctttacctccagggcaacaggatcaatgagttctccatcagcagcttctgcacggtggtggacgtcatgaacttctccaagctgcaggtgctacgcctggatgggaacgagatcaagcgcagcgcaatgccggtggacgccccactctgcctgcgcctcgccaacctcatcgagatcactagtaa

SEQ ID NO: 12 - DNA, 1285 bp, Mus musculus
aagatatcatgggctttttaagtccaatatatgtccttttcttctgttttggagttagagtatactgccaatatgaagcttaccgatgggatgacgattatgaccaagagccaaatgaggattatgatccagaattccaatttcatcaaaatattgaatatggagttcccttttataataatattttaggttgtgctaaggaatgcttctgtccaactaactttccaacatcaatgtactgtgacaatcgtaaactcaagactatcccaattattccaatgcacattcagcaactcaaccttcagttcaatgacattgaggctgtgactgcaaattcattcatcaatgcaactcatcttaaagaaattaaccttagccacaacaaaattaaatctcaaaagattgattatggtgtattcgctaaactttcaaatctacaacaacttcatctagagcacaataacctagaagaatttccatttccacttccaaaatctttggaaagactccttcttggttataatgaaatctccatacttccaacaaatgccatggacgggctggtgaatgtgactatgcttgacctctgctataatcatctttctgattcgatgttaaaagaaaagaccctttccaaaatggaaaaattaatgcagctcaacctatgtaataacagattagaatcaatgccccttggattgccttcatcacttatgtatctatctttagaaaataattcaatttcatctataccagacaattattttgacaaacttccaaaacttcatgctctaagaatatcacacaacaaactggaagacattccatatgacatctttaatctttccaatcttatagaactcaacgttggacacaataaattgaagcaagcattctacattccaaggaatttggaacatctatacctacaaaataatgaaatagaaagcatcaatgtgacaatgatatgtccttctcctgatccagtacaccatcaccatttaacataccttcgtgtggaccaaaataagctgaaagaaccaataagttcatacatcttcttctgcttccctcgtatacacagtatttattatggtgagcagaggagtactaacggtgaaacaattcaactgaagacccaagttttcaggagctaccaagaggaggaagaggaagacgaccatgacagtcaggacaacactcttgagggtcaagaagtatcagatgagcactataattctcattactatgagatgcaagagtggcaagatactataactagtaa

SEQ ID NO: 13 - DNA, 3039 bp, Mus musculus
gcacgaggctcccccgccgcgtcacggacctgcccgccctcccggcccctccccgcgctccgttccctgctctcccgcccccctgcgagcgagcggtgacttaagcaacggagcgcagcgaagcccatttttctccttgctcgcagccgcgccgggcagctcgtggcgcggcgtctccgctccggcccgagatgaatgctgcggcagaagccgagttcaacatcctgctggccaccgactcgtacaaggttactcactataaacaatacccacccaacacaagcaaagtttattcctactttgaatgccgtgaaaagaagacagaaaactccaaagtaaggaaggtgaaatacgaggaaacagtattttatgggttgcagtacattcttaataagtacttaaaaggtaaagtagtgaccaaagagaaaatccaggaggccaaagaagtgtacagagaacatttccaagatgatgtctttaacgaaagaggatggaactacatccttgagaaatacgatggtcatctcccgattgaagtaaaggctgttcccgagggctctgtcatccccagagggaacgtgctgttcacagtggaaaacacagacccagagtgctactggcttaccaattggattgagactattcttgttcagtcctggtatccaattacagtggccacaaattccagagaacagaagaaaatactggccaaatatttgttagaaacctctggtaacttagatggtctggaatacaagttacatgactttggttacagaggagtctcttcgcaagagactgctggcataggggcatctgctcatttggttaactttaaaggaacagatactgtggcgggaattgctctaattaaaaaatactatgggacaaaagatcctgttccaggctattctgttccagcagcagagcacagtaccataacggcttgggggaaagaccatgagaaagatgcttttgaacacatagtaacacagttctcatcagtgcctgtgtctgtggtcagcgatagctatgacatttataatgcgtgtgagaaaatatggggtgaagacctgagacatctgatagtatcgagaagtacagaggcaccactaatcatcagacctgactctggaaatcctcttgacactgtattgaaggtcttagatattttaggcaagaagtttcctgttactgagaactcaaaaggctacaagttgctgccaccttatcttagagtcattcaaggagatggcgtggatatcaatactttacaagagattgtagagggaatgaaacaaaagaagtggagtatcgagaatgtctccttcggttctggtggcgctttgctacagaagttaacccgagacctcttgaattgctccttcaagtgcagctatgttgtaaccaatggccttggggttaatgtgtttaaggacccagttgctgatcccaacaaaaggtcaaaaaagggccggttatctttacataggacaccagcggggaactttgttacacttgaagaaggaaaaggagaccttgaggaatatggccatgatcttctccatacggttttcaagaatgggaaggtgacaaaaagctactcatttgatgaagtcagaaaaaatgcacagctgaacatcgagcaggacgtggcacctcattaggcttcatgtggccgggttgttatgtgtgcagtgtgtgtatacatacatgcacgtatgtgtgcgcctgtgcgtatgtactaacatgttcattgtacagatgtgtgggttcgtgtttatgatacactgcagccagattatttgttggtttatggacatactgccctttttatttttctcccagtgtttagatgatctcagattagaaaacacttacaaccatgtacaagattaatgctgaagcaagcttttcagggtcctttgctaatagatagtaatccaatctggtgttgatcttttcacaaataacaaaccaagaaacttttatatataactacagatcacataaaacagatttgcataaaattaccatgcctgctttatgtttatatttaacttgtatttttgtacaaacgagattgtgtaagatatatttaaagtttcagtgatttaccagtctgtttccaacttttcatgatttttatgagcacagactttcaagaaaatacttgaaataaattacattgccttttgtccattaatcagcaaataaaacatggccttaaccaagttgtttgtggtgttgtacatttgcaaattatgtcaggacagacagacacccaacagagttccgaacatcactgcccttgtagagtatgcagcagtcattctccgtggaagagaagaatggttcttacgcgaatgtttaggcattgtacagttctgtgccctggtcagtgtatgtaccagtgatgccaaatcccaaaggcctgttctgcaattttatatgttggatattgcctgtggctctaatatgcacctcaagattttaagaagataatgtttttagagagaatttctgcttccactatagaatatatacataaatgtaaaatattgaaagtggaagtagtgtattttaaagtaattacacttctgaatttatttttcatattctatagttggtatgtcttaaatgaattgctggagtgggtagtgagtgtacttattttaaatgttttgattctgttatattttcattaagttttttaaaaattaaattggatattaaactgtaaaaaaaaaaaaaaaaaactcgagggggggccgggcccaattcgcctatatgagcgatttaccgcgctccctggcgccgtttacacgcgggatgggaaacctggggtcccaattaaatgcttgggacatccccttttccatggggtaaaagaaaagcccacccaggccttccacatggcccccgagggagggaaatgacctaatttttaaatcgggaatttgtgaaacctttttaacaagcgacggaaactttaataaaaaacccaagggggggtgcccggccgacctttaaacggcc

SEQ ID NO: 14 - DNA, 5041 bp, Mus musculus
gcggccgcgactattcggtacctgaaaacaacgatggcatggaaaacacttcccatttacctgttgttgctgctgtctgttttcgtgattcagcaagtttcatctcaagatttatcaagctgtgcagggagatgtggggaagggtattctagagatgccacctgcaactgtgattataactgtcaacactacatggagtgctgccctgatttcaagagagtctgcactgcggagctttcctgtaaaggccgctgctttgagtccttcgagagagggagggagtgtgactgcgacgcccaatgtaagaagtatgacaagtgctgtcccgattatgagagtttctgtgcagaagtgcataatcccacatcaccaccatcttcaaagaaagcacctccaccttcaggagcatctcaaaccatcaaatcaacaaccaaacgttcacccaaaccaccaaacaagaagaagactaagaaagttatagaatcagaggaaataacagaagaacattctgtttctgaaaatcaagagtcctcctcctcctcctcctcttcctcttcttcttcaacaatttggaaaatcaagtcttccaaaaattcagctgctaatagagaattacagaagaaactcaaagtaaaagataacaagaagaacagaactaaaaagaaacctacccccaaaccaccagttgtagatgaagctggaagtggattggacaatggtgacttcaaggtcacaactcctgacacgtctaccacccaacacaataaagtcagcacatctcccaagatcacaacagcaaaaccaataaatcccagacccagtcttccacctaattctgatacatctaaagagacgtctttgacagtgaataaagagacaacagttgaaactaaagaaactactacaacaaataaacagacttcaactgatggaaaagagaagactacttccgctaaagagacacaaagtatagagaaaacatctgctaaagatttagcacccacatctaaagtgctggctaaacctacacccaaagctgaaactacaaccaaaggccctgctctcaccactcccaaggagcccacgcccaccactcccaaggagcctgcatctaccacacccaaagagcccacacctaccaccatcaagtctgcacccaccacccccaaggagcctgcacccaccaccaccaagtctgcacccaccactcccaaggagcctgcacccaccaccaccaaggagcctgcacccaccactcccaaggagcctgcacccaccaccaccaaggagcctgcacccaccaccaccaagtctgcacccaccactcccaaggagcctgcacccaccacccccaagaagcctgccccaactacccccaaggagcctgcacccaccactcccaaggagcctacacccaccactcccaaggagcctgcacccaccaccaaggagcctgcacccaccactcccaaagagcctgcacccactgcccccaagaagcctgccccaactacccccaaggagcctgcacccaccactcccaaggagcctgcacccaccaccaccaaggagccttcacccaccactcccaaggagcctgcacccaccaccaccaagtctgcacccaccactaccaaggagcctgcacccaccactaccaagtctgcacccaccactcccaaggagccttcacccaccaccaccaaggagcctgcacccaccactcccaaggagcctgcacccaccacccccaagaagcctgccccaactacccccaaggagcctgcacccaccactcccaaggaacctgcacccaccaccaccaagaagcctgcacccaccgctcccaaagagcctgccccaactacccccaaggagactgcacccaccacccccaagaagctcacgcccaccacccccgagaagctcgcacccaccacccctgagaagcccgcacccaccacccctgaggagctcgcacccaccacccctgaggagcccacacccaccacccctgaggagcctgctcccaccactcccaaggcagcggctcccaacacccctaaggagcctgctccaactacccctaaggagcctgctccaactacccctaaggagcctgctccaactacccctaaggagactgctccaactacccctaaagggactgctccaactaccctcaaggaacctgcacccactactcccaagaagcctgcccccaaggagcttgcacccaccaccaccaaggagcccacatccaccacctctgacaagcccgctccaactacccctaaggggactgctccaactacccctaaggagcctgctccaactacccctaaggagcctgctccaactacccctaaggggactgctccaactaccctcaaggaacctgcacccactactcccaagaagcctgcccccaaggagcttgcacccaccaccaccaaggggcccacatccaccacctctgacaagcctgctccaactacacctaaggagactgctccaactacccccaaggagcctgcacccactacccccaagaagcctgctccaactactcctgagacacctcctccaaccacttcagaggtctctactccaactaccaccaaggagcctaccactatccacaaaagccctgatgaatcaactcctgagctttctgcagaacccacaccaaaagctcttgaaaacagtcccaaggaacctggtgtacctacaactaagactcctgcagcgactaaacctgaaatgactacaacagctaaagacaagacaacagaaagagacttacgtactacacctgaaactacaactgctgcacctaagatgacaaaagagacagcaactacaacagaaaaaactaccgaatccaaaataacagctacaaccacacaagtaacatctaccacaactcaagataccacaccattcaaaattactactcttaaaacaactactcttgcacccaaagtaactacaacaaaaaagacaattactaccactgagattatgaacaaacctgaagaaacagctaaaccaaaagacagagctactaattctaaagcgacaactcctaaacctcaaaagccaaccaaagcacccaaaaaacccacttctaccaaaaagccaaaaacaatgcctagagtgagaaaaccaaagacgacaccaactccccgcaagatgacatcaacaatgccagaattgaaccctacctcaagaatagcagaagccatgctccaaaccaccaccagacctaaccaaactccaaactccaaactagttgaagtaaatccaaagagtgaagatgcaggtggtgctgaaggagaaacacctcatatgcttctcaggccccatgtgttcatgcctgaagttactcccgacatggattacttaccgagagtacccaatcaaggcattatcatcaatcccatgctttccgatgagaccaatatatgcaatggtaagccagtagatggactgactactttgcgcaatgggacattagttgcattccgaggtcattatttctggatgctaagtccattcagtccaccatctccagctcgcagaattactgaagtttggggtattccttcccccattgatactgtttttactaggtgcaactgtgaaggaaaaactttcttctttaaggattctcagtactggcgttttaccaatgatataaaagatgcagggtaccccaaaccaattttcaaaggatttggaggactaactggacaaatagtggcagcgctttcaacagctaaatataagaactggcctgaatctgtgtattttttcaagagaggtggcagcattcagcagtatatttataaacaggaacctgtacagaagtgccctggaagaaggcctgctctaaattatccagtgtatggagaaatgacacaggttaggagacgtcgctttgaacgtgctataggaccttctcaaacacacaccatcagaattcaatattcacctgccagactggcttatcaagacaaaggtgtccttcataatgaagttaaagtgagtatactgtggagaggacttccaaatgtggttacctcagctatatcactgcccaacatcagaaaacctgacggctatgattactatgccttttctaaagatcaatactataacattgatgtgcctagtagaacagcaagagcaattactactcgttctgggcagaccttatccaaagtctggtacaactgtccttagactgatgagcaaaggaggagtcaactaatgaagaaatgaataataaattttgacactgaaaaacattttattaataaagaatattgacatgagtataccagtttatatataaaaatgtttttaaacttgacaatcattacactaaaacagatttgataatcttattcacagttgttattgtttacagaccatttaattaatatttcctctgtttattcctcctctccctcccattgcatggctcacacctgtaaaagaaaaaagaatcaaattgaatatatcttttaagaattcaaaactagtgtattcacttaccctagttcattataaaaaatatctaggcattgtggatataaaactgttgggtattctacaacttcaatggaaattattacaagcagattaatccctctttttgtgacacaagtacaatctaaaagttatattggaaaacatggaaatattaaaattttacacttttactagctaaaacataatcacaaagctttatcgtgttgtataaaaaaattaacaatataatggcaataggtagagatacaacaaatgaatataacactataacacttcatattttccaaatcttaatttggatttaaggaagaaatcaataaatataaaatataagcacatatttattatatatctaaggtatacaaatctgtctacatgaagtttacagattggtaaatatcacctgctcaacatgtaattatttaataaaactttggaacattaaaaaaataaattggaggcttaaaaaaaaaaaaaaaaa

SEQ ID NO: 15 - DNA, 860 bp, Mus musculus
catcgatatgggctcctgtgcacagggattcatgctgggatgctgcctgctgctggccatcacctggggccccatcctgagccttgtgccacgagttcaggaggaacaacaggagtgggaagagacagaggagctgccatctcctctggatcctgtgacaaggcctgaagaaacacgagagaagtatagccctcgccagggtgaggacctccccacttctcggtgctaccgatgctgtgaccccagcacacctgtataccagacaattcctccaccccagatcaacatcaccatcctgaaaggcgagaaaggtgaccgaggggatcgaggcctccaggggaagtacggcaaaataggttctacaggtcccaggggccatgttggccccaaagggcagaagggatccattggagcccctgggaaccactgcaagagccagtacgcagccttctccgtgggccggaagaaggctttgcacagcaacgactacttccagcccgtggtcttcgacacggagtttgtgaacctctacaaacacttcaatatgttcactgggaagttctactgctatgtgccgggcatctacttcttcagcctcaacgtgcacacttggaaccagaaggagacgtacctgcacatcatgaagaacgaggaggaggtggtgatcctgtatgcgcaggtgagcgaccgcagcatcatgcagagtcagagcctgatgatggagctgcgggaggaggatgaggtctgggtgcgtctcttcaagggcgagcgtgagaacgccattttcagtgacgagttcgacacctacatcaccttcagtggctacctggtcaagccagcctctgagcccgcggccgctt

SEQ ID NO: 16 - DNA, 1062 bp, Mus musculus
cgatcgatatgctcgcctccgtcgcaggtcccatcagcctcgccttggtgctcctcgccctctgcacccggcctgctacgggccaggactgcagcgcgcaatgtcagtgcgcagccgaagcagcgccgcactgccccgccggcgtgagcctggtgctggacggctgcggctgctgccgcgtctgcgccaagcagctgggagaactgtgtacggagcgtgacccctgcgacccacacaagggcctcttctgcgatttcggctcccccgccaaccgcaagattggagtgtgcactgccaaagatggtgcaccctgtgtcttcggtgggtcggtgtaccgcagcggtgagtccttccaaagcagctgcaaataccaatgcacttgcctggatggggccgtgggctgcgtgcccctatgcagcatggacgtgcgcctgcccagccctgactgccccttcccgagaagggtcaagctgcctgggaaatgctgcgaggagtgggtgtgtgacgagcccaaggaccgcacagcagttggccctgccctagctgcctaccgactggaagacacatttggcccagacccaactatgatgcgagccaactgcctggtccagaccacagagtggagcgcctgttctaagacctgtggaatgggcatctccacccgagttaccaatgacaataccttctgcagactggagaagcagagccgcctctgcatggtcaggccctgcgaagctgacctggaggaaaacattaagaagggcaaaaagtgcatccggacacctaaaatcgccaagcctgtcaagtttgagctttctggctgcaccagtgtgaagacatacagggctaagttctgcggggtgtgcacagacggccgctgctgcacaccgcacagaaccaccactctgccagtggagttcaaatgccccgatggcgagatcatgaaaaagaatatgatgttcatcaagacctgtgcctgccattacaactgtcctggggacaatgacatctttgagtccctgtactacaggaagatgtacggagacatggcggcggccgctt

SEQ ID NO: 17 - DNA, 862 bp, Mus musculus
cgatcgatatgatggagcggccgccgcgcgccctgctgctgggtgcagccggactgctgctcctgctcctgcccctctcctcttcctcctcttcggatgcctgcggcccgtgcgtgccggcctcctgccccgcgctgccccggctcggctgcccgctgggtgagacccgcgacgcgtgcgggtgctgcccggtgtgtgctcgcggcgagggtgagccgtgcgggggcggcgcggccggcggggggcactgcgcgccgggcatggagtgcgtgaagagccgcaagaggcggaggggtaaagccggggcagcagccggcggtcccgcgaccctcgccgtgtgcgtgtgcaagagccgctacccggtgtgcggcagcaacggcatcacctaccccagcggctgccagctgcgcgctgccagcctgcgcgccgagagccgcggggagaaggccatcacccaggtcagcaagggcacctgcgagcaaggtccttccatagtgacgccccccaaggacatctggaacgtcactggtgccaaggtgttcttgagctgtgaggtcatcgggatcccaacccctgtcctcatctggaacaaggtaaaaagggatcactctggagttcagcggacagaactcttgcctggtgaccgggaaaatctggccattcagacccggggtggtccagaaaagcatgaagtaacgggctgggtgctggtatctcctctaagtaaggaggacgctggagagtatgagtgccacgcatccaactcccaagggcaggcttccgcggcagccaaaattacagtggttgatgccctccatgaaataccactgaaaaaaggtgaaggtgctcagttagttaactt

SEQ ID NO: 18 - DNA, 633 bp, Mus musculus
cgatcgatatgatggccccctttgcatctctggcatctggcatcctcttgttgctatcactgatagcttccagtaaggcctgtagctgtgccccaccccacccacagacagccttctgcaactcggacctggtcataagggctaaattcatgggttccccagaaatcaacgagaccaccttataccagcgttataagatcaagatgactaagatgctaaaaggattcaaggctgtgggaaatgccgcagatatccggtacgcctacaccccagtcatggaaagcctctgtggatatgcccacaagtcccagaaccgcagtgaagagtttctcatcacgggccgcctaaggaacggaaatttgcacatcagtgcctgcagcttcttggttccctggcgtactctgagccctgctcagcaaagagctttctcaaagacctatagtgctggctgtggggtgtgcacagtgtttccctgtttatctatcccttgcaaactggagagtgacactcactgtttgtggacggatcaggtcctcgtgggctctgaggactaccagagccgtcactttgcttgcctgccacggaatccaggcttgtgcacctggagatcccttggggcccgagcggccgctt

SEQ ID NO: 19 - DNA, 912 bp, Mus musculus
cgatcgatatggagactgtgcactctacatttctcctgctactcttcgtgcctctgacacagcaagcaccacagtcgcagctggactcacatgttaactatgagtatgcaacaggcaattctgaagaaaccaaatttagccaggattatgaagataaatacctggatgggaaaagtattaaggaaaaagaaactatgataattcctgatgagaaaagtcttcagttacaaaaagatgaagttataccatcattaccaaccaagaaagaaaatgatgaaatgcccacatgcctgttgtgtgtctgcttaagtggctctgtctactgtgaagaagttgacattgatgctgtaccaccattgccaaaggaatcagcttatctttatgcacgattcaacaaaattaaaaagctgactgccaaggattttgcagacatgccaaacctaagaagacttgattttacgggaaatttgatagaagacatagaagatgggactttttcaaaactttctctgttagaagaacttacacttgctgaaaaccaactactaagacttccagttcttcctccaaagcttactttacttaatgccaaacacaacaaaatcaagagtaaaggaattaaagcaaacacattcaaaaaactgaataaactctcttttctctatttggaccataacgacctggaatctgtgcctcctaatttaccagaaagtctacgtgtaattcaccttcagtttaacagcatatcttcacttacagatgatacattctgcaaggctaatgacactcgttacattcgggagcgaattgaagagattcgcctggagggcaatccaattgctctgggaaagcatccaaacagttttatctgcttaaaaagattacccatagggtcatacttcgcggccgctt

SEQ ID NO: 20 - DNA, 1212 bp, Mus musculus
cggaattcgccatgaattggcattttcctttcttcatcttgaccacagtgactttatactctgtgcactcccagttcaactctctgtcactggaggaactaggctccaacacagggatccaggtcttcaatcagatcatcaagtcacggcctcatgagaacgttgttgtctccccacatgggatcgcgtccatcttgggcatgctgcagctcggggctgacggcaagacaaagaagcagctctccacggtgatgcgatataatgtaaacggagttggtaaagtgctgaagaagatcaacaaggctattgtctccaagaaaaataaagacattgtgaccgtggccaatgctgtatttctcaggaatggctttaaaatggaagtgccttttgcagtaaggaacaaagatgtgtttcagtgtgaagtgcagaatgtgaacttccaggacccagcctctgcctctgagtccatcaatttttgggtcaaaaatgagaccaggggcatgattgataacctgctttccccaaatctgatcgatggtgcccttaccaggctggtcctcgttaatgcagtgtatttcaagggtttgtggaagtctcggtttcaaccagagagcacaaagaaacggacattcgtggcaggtgatgggaaatcctaccaagtacccatgttggctcagctctctgtgttccgctcagggtctaccaggaccccgaatggcttatggtacaacttcattgagctgccctaccatggtgagagcatcagcatgctgatcgccctgccaacagagagctccaccccactgtctgccatcatccctcacatcactaccaagaccattgatagctggatgaacaccatggtacccaagaggatgcagctggtcctacccaagttcacagctgtggcacaaacagatctgaaggagccactgaaagcccttggcgttactgagatgtttgagccatcaaaggcaaattttacaaaaataacaaggtcagagagccttcatgtctctcacatcttgcaaaaagcaaaaattgaagtcagtgaagatggaaccaaagcttcggcagcaacaactgcaatcctaattgcaaggtcatcacctccctggtttatagtagacaggcctttcctgttttccatccgacacaatcccacaggtgccatcttgttcctgggccaggtgaacaagcccgcggccgctt

SEQ ID NO: 21 - DNA, 462 bp, Mus musculus
cgatcgatatgcaggtccctgtcatgcttctgggcctgctgttcacagttgccggctggagcatccacgtgttggctcagccagatgcagttaacgccccactcacctgctgctactcattcaccagcaagatgatcccaatgagtaggctggagagctacaagaggatcaccagcagcaggtgtcccaaagaagctgtagtttttgtcaccaagctcaagagagaggtctgtgctgaccccaagaaggaatgggtccagacatacattaaaaacctggatcggaaccaaatgagatcagaacctacaactttatttaaaactgcatctgccctaaggtcttcagcacctttgaatgtgaagttgacccgtaaatctgaagctaatgcatccactaccttttccacaaccacctcaagcacttctgtaggagtgaccagtgtgacagtgaacgcggccgctt

SEQ ID NO: 22 - DNA, 1824 bp, Mus musculus
gcaagcttctagaatgtgggtcctgatgagctggctggccttcgcggcagggctggtagccggaacacagtgtccagatgggcagttctgccctgttgcctgctgccttgaccagggaggagccaactacagctgctgtaaccctcttctggacacatggcctagaataacgagccatcatctagatggctcctgccagacccatggccactgtcctgctggctattcttgtcttctcactgtgtctgggacttccagctgctgcccgttctctaagggtgtgtcttgtggtgatggctaccactgctgcccccagggcttccactgtagtgcagatgggaaatcctgcttccagatgtcagataaccccttgggtgctgtccagtgtcctgggagccagtttgaatgtcctgactctgccacctgctgcattatggttgatggttcgtggggatgttgtcccatgccccaggcctcttgctgtgaagacagagtgcattgctgtccccatggggcctcctgtgacctggttcacacacgatgcgtttcacccacgggcacccacaccctactaaagaagttccctgcacaaaagaccaacagggcagtgtctttgcctttttctgtcgtgtgccctgatgctaagacccagtgtcccgatgattctacctgctgtgagctacccactgggaagtatggctgctgtccaatgcccaatgccatctgctgttccgaccacctgcactgctgcccccaggacactgtatgtgacctgatccagagtaagtgcctatccaagaactacaccacggatctcctgaccaagctgcctggatacccagtgaaggaggtgaagtgcgacatggaggtgagctgccctgaaggatatacctgctgccgcctcaacactggggcctggggctgctgtccatttgccaaggccgtgtgttgtgaggatcacattcattgctgcccggcagggtttcagtgtcacacagagaaaggaacctgcgaaatgggtatcctccaagtaccctggatgaagaaggtcatagcccccctccgcctgccagacccacagatcttgaagagtgatacaccttgtgatgacttcactaggtgtcctacaaacaatacctgctgcaaactcaattctggggactggggctgctgtcccatcccagaggctgtctgctgctcagacaaccagcattgctgccctcagggcttcacatgtctggctcaggggtactgtcagaagggagacacaatggtggctggcctggagaagatacctgcccgccagacaaccccgctccaaattggagatatcggttgtgaccagcataccagctgcccagtagggcaaacctgctgcccaagcctcaagggaagttgggcctgctgccagctgccccatgctgtgtgctgtgaggaccggcagcactgttgcccggccgggtacacctgcaatgtgaaggcgaggacctgtgagaaggatgtcgattttatccagcctcccgtgctcctgaccctcggccctaaggttgggaatgtggagtgtggagaagggcatttctgccatgataaccagacctgttgtaaagacagtgcaggagtctgggcctgctgtccctacctaaagggtgtctgctgtagagatggacgtcactgttgccccggtggcttccactgttcagccaggggaaccaagtgtttgcgaaagaagattcctcgctgggacatgtttttgagggatccggtcccaagaccgctactgggatcctacccatacgacgtcccagactacgcttagactagtgc

SEQ ID NO: 23 - DNA, 2871 bp, Mus musculus
cgatcgatatgggggacgtccagcgggcagcgagatctcggggctctctgtccgcacacatgctgttgctgctcctcgcttccataacaatgctgctatgtgcgcggggcgcacacgggcgccccacggaggaagatgaggagctggtcctgccctcgctggagcgcgccccgggccacgattccaccaccacacgccttcgtctggacgcctttggccagcagctacatctgaagttgcagccggacagcggtttcttggcgcctggcttcaccctgcagactgtggggcgcagtcccgggtccgaggcacaacatctggaccccaccggggacctggctcactgcttctactctggcacggtgaacggtgatcccggctctgccgcagccctcagcctctgtgaaggtgtgcgtggtgccttctacctacaaggagaggagttcttcattcagccagcgcctggagtggccaccgagcgcctggcccctgccgtgcccgaggaggagtcatccgcacggccgcagttccacatcctgaggcgaaggcggcggggcagtggcggcgccaagtgcggcgtcatggacgacgagaccctgccaaccagcgactcgcgacccgagagccagaacacccggaaccagtggcctgtgcgggaccccacgcctcaggacgcgggaaagccatcaggaccaggaagcataaggaagaagcgatttgtgtccagcccccgttatgtggaaaccatgctcgtggctgaccagtccatggccgacttccacggcagcggtctaaagcattaccttctaaccctgttctcggtggcagccaggttttacaagcatcccagcattaggaattcaattagcctggtggtggtgaagatcttggtcatatatgaggagcagaagggaccagaagttacctccaatgcagctctcacccttcggaatttctgcaactggcagaaacaacacaacagccccagtgaccgggatccagagcactatgacactgcaattctgttcaccagacaggatttatgtggctcccacacgtgtgacactctcgggatggcagatgttggaactgtatgtgaccccagcaggagctgctcagtcatagaagatgatggtttgcaagccgccttcaccacagcccacgaattgggccatgtgtttaacatgccgcacgatgatgctaagcactgtgccagcttgaatggtgtgactggcgattctcatctgatggcctcgatgctctccagcttagaccatagccagccctggtcaccttgcagtgcctacatggtcacgtccttcctagataatggacacggggaatgtttgatggacaagccccagaatccaatcaagctcccttctgatcttcccggtaccttgtacgatgccaaccgccagtgtcagtttacattcggagaggaatccaagcactgccctgatgcagccagcacatgtactaccctgtggtgcactggcacctccggtggcttactggtgtgccaaacaaaacacttcccttgggcagatggcaccagctgtggagaagggaagtggtgtgtcagtggcaagtgcgtgaacaagacagacatgaagcattttgctactcctgttcatggaagctggggaccatggggaccgtggggagactgctcaagaacctgtggtggtggagttcaatacacaatgagagaatgtgacaacccagtcccaaagaacggagggaagtactgtgaaggcaaacgagtccgctacaggtcctgtaacatcgaggactgtccagacaataacggaaaaacgttcagagaggagcagtgcgaggcgcacaatgagttttccaaagcttcctttgggaatgagcccactgtagagtggacacccaagtacgccggcgtctcgccaaaggacaggtgcaagctcacctgtgaagccaaaggcattggctactttttcgtcttacagcccaaggttgtagatggcactccctgtagtccagactctacctctgtctgtgtgcaagggcagtgtgtgaaagctggctgtgatcgcatcatagactccaaaaagaagtttgataagtgtggcgtttgtggaggaaacggttccacatgcaagaagatgtcaggaatagtcactagtacaagacctgggtatcatgacattgtcacaattcctgctggagccaccaacattgaagtgaaacatcggaatcaaagggggtccagaaacaatggcagctttctggctattagagccgctgatggtacctatattctgaatggaaacttcactctgtccacactagagcaagacctcacctacaaaggtactgtcttaaggtacagtggttcctcggctgcgctggagagaatccgcagctttagtccactcaaagaacccttaaccatccaggttcttatggtaggccatgctctccgacccaaaattaaattcacctactttatgaagaagaagacagagtcattcaacgccattcccacattttctgagtgggtgattgaagagtggggggagtgctccaagacatgcggctcaggttggcagagaagagtagtgcagtgcagagacattaatggacaccctgcttccgaatgtgcaaaggaagtgaagccagccagtaccagaccttgtgcagaccttccttgcccacactggcaggtgggggattggtcaccatgttccaaaacttgcgggaagggttacaagaagagaaccttgaaatgtgtgtcccacgatgggggcgtgttatcaaatgagagctgtgatcctttgaagaagccaaagcattacattgacttttgcacactgacacagtgcagtgcggccgctt

SEQ ID NO: 24 - DNA, 438 bp, Mus musculus
cgatcgatatggccagcccgctgcgctccttgctgttcctgctggccgtcctggccgtggcctgggcggcgaccccaaaacaaggcccgcgaatgttgggagccccggaggaggcagatgccaatgaggaaggcgtgcggcgagcgttggacttcgctgtgagcgagtacaacaagggcagcaacgatgcgtaccacagccgcgccatacaggtggtgagagctcgtaagcagctcgtggctggagtgaactattttttggatgtggagatgggccgaactacatgtaccaagtcccagacaaatttgactgactgtcctttccatgaccagccccatctgatgaggaaggcactctgctccttccagatctacagcgtgccctggaaaggcacacactccctgacaaaattcagctgcaaaaatgccgcggccgctt

SEQ ID NO: 25 - DNA, 522 bp, Mus musculus
cgatcgatatgtcgtcccagcaatatcagcagcaacgtagaaaatttgcagctgccttcctggcattgattttcatcttggcagctgtggacactgctgaggccgggaagaaagagaaacctgaaaaaaaggtgaaaaagtctgactgtggagaatggcagtggagtgtgtgtgtgcctaccagcggggactgtggattgggcacccgggagggcactcgcactggcgccgagtgcaaacagaccatgaagactcagagatgtaagatcccttgcaactggaagaagcagtttggagctgagtgcaagtaccagttccaggcttggggagaatgtgacctcaataccgccttgaagaccagaactggcagcctgaagcgagctctgcacaatgctgactgtcagaaaactgtcaccatctccaagccctgtggcaagctcaccaagcccaagcctcaagcggagtcaaagaagaagaaaaaggaaggcaagaaacaggagaagatgctggatgcggccgctt

SEQ ID NO: 26 - DNA, 2991 bp, Mus musculus
cgatcgatatgcccggcgtggcccgcccgccgctgccgctgctgtcgctgccgctgctactgctgctgctgctgctcccagcgcgccggccggccgctggacttggccgactacacctacgacctgggcgaggaggacgccccggagctcctcaactacaaagacccttgcaaggcggctgccttccttgggacattgccctggatgaggaggacttgagggccttccaggtgcagcaggctgcagttctcagacagcaaacagcccgaaggccatccatcaaagctgcaggaaactcttctgccctgggtggtcagggcactagtggacagccgcagagggaaagcaggggcagatggagaggcaggcctcggagcaggcgggcagcgacgtccagaccggagcgggtgtggcccgatggggtcatcccgtttgtgattggagggaatttcaccggcagccagagggcagtcttccggcaggccatgagacactgggagaagcatacctgtgtcaccttcttggagcgcacagatgaggacagctatattgtattcacctaccgaccctgcgggtgctgctcctacgtgggtcgccgaggtgggggcccccaggccatctccatcggcaagaactgtgacaagtttggcatcgtggtccatgagctgggccatgtcattggcttctggcacgagcacacgcggcccgaccgggaccgccatgtctctattgtacgcgagaacatacagccagggcaggagtataacttcttgaagatggaggttcaagaagtggagtccttgggagagacctatgactttgacagtatcatgcactatgcccggaacacattctccaggggcatcttcttggacaccattgttcccaagtatgaggtgaatggggtgaagccttccattggccaaaggacccgactcagcaagggggacatcgctcaggcccggaagctctacaaatgcccagcctgtggcgagaccctccaagacagcactggcaacttctcctcccctgagtatcccaatggctactctgcccacatgcactgtgtatggcgcatctctgtcacacctggggagaagattattctaaacttcacatccatggacctgtaccgtagccgcctgtgctggtatgactatgtggaggtgcgggatggcttctggagaaaggcgcccctccgaggccggttctgtgggggcaaactccccgagcccatcgtctccaccgacagccgcctctgggtggaattccgaagcagcagcaactgggttggaaagggcttctttgctgtctatgaagccatttgcggtggcgatgtgaaaaaggataatggccatatccagtctcccaattacccagacgattatcggcccagcaaagtctgcatctggcggatccaggtgtctgagggtttccacgtgggcctcacgttccagtcctttgagattgagcgtcacgacagttgtgcctacgactacctggaagtccgtgatgggcacagcgagagcagcaacctcattgggcgctactgtggctatgagaagcctgatgacatcaaaagcgcatccagtcggctctggctcaagttcgtctctgacgggtccattaacaaagctggcttcgcagtcaactttttcaaagaggtggatgagtgttcaaggcccaaccgcgggggctgtgagcagcggtgcctgaacaccctgggcggctacaagtgcagctgtgaccctggctatgagctggccccagacaagcgtcggtgtgaggctgcctgtggtggattcctcaccaagctcaatggctccatcaccagccccggttggcccaaagagtaccctcccaacaaaaactgcatctggcagttggtggcccccacccagtaccgtatctccctgcaatttgacttcttcgagactgagggcaatgatgtgtgcaagtacgactttgtggaggtgcgcagcggactcacggcggactctaagctgcatggcaagttctgcggctccgagaagccagaggtcatcacttcccagtacaacaatatgcgtgtggagttcaagtctgacaatactgtgtccaaaaagggcttcaaggcccacttcttctcagataaggatgaatgttccaaggacaatggtggatgccagcaagactgtgtgaacacgttcggcagctacgagtgtcagtgccgcagtggcttcgtccttcacgacaacaaacatgactgtaaagaagctggctgtgaacacaaggtgacatccaccagtggcaccatcaccagccccaactggcctgacaagtaccccagcaagaaggagtgtacgtgggctatctccagcacccctgggcaccgggtaaagctgactttcgtggagatggatattgagtctcagcccgagtgtgcttatgaccacctggaggtgttcggtggacgtgatgccaaggcaccagtccttggacgattctgtggcagtaagaagcctgagccagtcctggctacaggcaaccgcatgttcttgcgcttctactcagacaactcggtacagaggaaaggtttccaggcatcccactccacagagtgtgggggccaagtgcgggcagatgtgaagaccaaagacctttattcccatgcccagttcggcgataacaactaccctggaggggtggactgcgagtgggtcatcgtggccgaggaaggctatggcgtggagctggtgttccagaccttcgaggtggaggaggagactgactgtggctatgactacatagagctctttgatggctacgacagcacagctcccagactggggcgctactgtggttctgggcctcccgaggaagtgtactcggctggagattctgtcctggtgaagttccactctgacgacaccatctccaagaaaggcttccacctgcggtacacaagcaccaagttccaggacacactccacagcaggaaggcggccgctt

SEQ ID NO: 27 - DNA, 878 bp, Mus musculus
gctctagacacacgcccatcatgacgaagactgagaagaaatccttccaccagagcctggccgagtggaagctgttcatctacaacccgagcagcggagagtttctggggcgcacctccaagagctggggtctgatcttgctcttctacctagttttttatgggttcttggctgcactcttcacattcacaatgtgggccatgctccagactctgaatgatgaagttccgaaatatcgagaccagattcctagtccaggacttatggtttttcccaaaccgcagactgccttggaatatacattcagcatgtctgagccacagacttacaaaaagttggttgaagacctggagagtttcctaaagccatattctgtggaagaacagaagaacctcacaagttgtcctgatggagcgccttttattcagcatggtcctgactatagggcatgtcagtttccagtctccttgcttgaagaatgtagtggtgtgactgatgctaattttggctattccaaaggacagccttgcatccttgtgaaaatgaacagaataatcgatttaatcccagacggatatccacaaatatcgtgtttgccaaaggaagaaaacgcaactatagcaacttatcctgaatttggagttttagacttaaagtattttccatattatgggaaaaaacggcatgttggatatcgacagcccctagttgccgtacaggtcaaatttgactctggtcttaacaagaaagaagtaacagttgagtgccatattgctggaaccaggaacctaaaaaacaagaatgagcgtgacaagttcttgggacgtgtttcgttcaaagtcacagcacgagcctaggaataggatgtctggatccgc

SEQ ID NO: 28 - DNA, 2789 bp, Mus musculus
aatctagaatgcccgggcgcgcgggcgtcgcccggttctgcttgctggctctcgctctgcagctacattggccgctggcggcgtgcgagccgggatggaccacaagaggaagccaagaaggtagccctccgctacagcatgaactcataatacctcagtggcggacttcagaaagccctgggagaggaaagcatccactcagagcagagctcagggtcatggctgaagggcgagagctgatcctagacctggagaagaacgagcacctttttgctccagcctacacagaaacctgctacactgcaagtggcaatcctcaaaccagcacgctgaagtctgaggatcactgcttttaccacgggactgtgagggacgtggatgagtccagtgtcacgctcagcacctgccggggaattagaggactgattatagtgagaagtaacctcagctacatcatcgagcccgtccctaacagcgacagccaacaccgtatttacagatccgaacatctcacgctgcccccggggaactgtgggttcgagcactccgggcccacctcgaaggactgggcccttcagtttacacatcagaccaaaaagcaacctcgcagaatgaaacgggaagatctacactctatgaagtacgtggagctttacctggtggctgattatgcagagtttcagaagaatcgacatgaccaggatgccaccaaacgcaagctcatggagattgccaactatgttgataagttttaccgctccctgaacatccgaattgcacttgtcggcttggaggtgtggacgcatggggataagtgtgaagtttcagagaatccctactctaccctctggtcctttcttagttggaggcgcaagctgcttgctcagaagagccatgacaatgctcagctaatcacgggcaggtccttccaaggcaccaccattggcctggcccccctcatggccatgtgctccgtgtaccagtctggaggagttagcatggaccactccgagaatgccattggtgtagcctccactgtggcccatgagattggccacaactttggcatgagccatgattctgcacactgctgttctgccagtgcagccgatggcggctgcatcatggccgccgccaccgggcaccctttccccaaagtgttcagttggtgtaacaggaaggagctggacaggtatctgcagacaggaggagggatgtgtctctccaacatgccggacactaggacgctgtatggaggccggaggtgtggcaacgggtacctggaagacggtgaagaatgtgactgtggagaagaggaggaatgtaagaacccttgctgcaatgcctccaactgcactctgaaggaaggggcagagtgtgcccatggttcctgctgccaccagtgcaagctggtggctcctggaacccagtgtcgggagcaggttcggcaatgtgacctccccgagttctgcaccggcaagtctccccactgccccaccaactattatcagatggatggcaccccctgcgagggtggccaggcctactgctacaacggcatgtgcctcacttaccaggaacagtgccagcagctgtggggacctggagcccggcctgccctcgatctttgctttgagagggtgaatgctgctggtgacacctatggaaactgtggcaagggcttgaatggccaatacaggaagtgcagtcccagggatgccaagtgtgggaagattcagtgccagagcacccaggcccggcccctggaatccaacgcagtatctattgacaccaccatcaccttgaacgggaggcggatccactgtcggggcacccacgtctaccggggtcctgaggaggaggaaggggaaggtgacatgctggacccagggctggtgatgactggaaccaagtgtggccacaaccatatttgcttcgaggggcagtgcaggaacacctccttctttgagacggaaggctgtgggaaaaagtgcaatggccacggggtctgcaacaacaacaagaactgtcattgcttccctggctggtctccacctttctgtaacaccccgggagatggtggcagcgtcgacagtggtcctttgccccctaagagtgtgggtcccgtgatcgctggggtgttttcagctctcttcgtgttggcagttctggtgctactgtgtcactgctacagacagagccacaaactgggcaaaccctcggctctccctttcaagctgcggcatcagttcagttgtcccttcagggtatctcagagtggtggaactggccatgccaacccaactttcaagttgcagaccccccagggcaagcgaaaggtgactaacacccctgaatccctccggaagccgtcccacccccctccccggccccctccagactacctgcgcgttgaatcgccacctgcaccattgccggcacatctgaacagggctgctgggagctccccagaagctggggctcgaatagaaagaaaggagtcagccaggaggcctcccccaagccgacccatgccccctgcacctaactgcctactgtcccaggacttctccaggcctcgaccacctcagaaggcactcccagccaatccggtgccaggccaaaggaccggtcccaggtcaggaggcacctccctgcttcagccccctacttctggtcctcagccccccaggcctccagcagtgcctgttccaaagctacccgagtaccgatcacagagggttggagcaataattagctccaagatcactagtaaaagggcgaattcg

SEQ ID NO: 29 - DNA, 2731 bp, Mus musculus
aatctagaatggagcgcgacggcgaccaggcagggcacgggccccggcacgggtcagcgggaaacggtcgcgagctcgagtcaccagccgcggcttcgctgctcgcgcccatggacctaggagaggagccgctggagaaggcggagcgtgcccgccctgccaaagaccccaacacctacaaagtgctgtcgctggttttgtcagtatgtgtgctaacaacaattcttggttgtatatttgggttgaaaccaagctgtgccaaagaagtaaaaagttgcaaaggccgctgctttgaaaggacgttcagcaactgtcgctgtgatgctgcctgtgtcagccttgggaactgctgtctggatttccaggagacctgtgtggaaccaacacatatatggacttgcaacaaattcaggtgcggtgagaagaggctgtccaggttcgtgtgctcctgtgcagacgactgcaaaacccacaatgactgttgcatcaactacagttctgtgtgccaagataagaagagttgggtagaagaaacatgtgaaagcatcgataccccggagtgtccagcagagtttgaatcaccccctactctcttgttttctttggatggattcagagctgagtatttgcacacctggggtggacttcttcctgtcattagcaagctgaaaaactgtggaacatacactaaaaacatgaggcctatgtaccctaccaagacgtttcccaatcattacagcatcgttacaggactttatccggaatcccatggcataattgataacaagatgtatgatcccaaaatgaatgcttctttctcgcttaaaagtaaagagaaattcaaccctttgtggtacaaaggacagccgatttgggtgaccgctaatcatcaggaggtcaagtccggcacatacttttggccaggatcagatgtggagattgacgggattctaccagatatctacaaagtgtataatgggtcagtaccatttgaagaaaggattttagctgttcttgagtggctacagcttcctagccatgaaagaccacacttttacactctgtatttagaagaaccagattcttcagggcattcacatggaccagtcagcagcgaggtcatcaaggccttgcagaaggttgaccgcctggtcggcatgctgatggacggcctgaaggacctgggcttggataaatgcctgaacctcatcctcatttcagatcacggcatggaacaaggcagctgtaagaagtatgtgtacctgaataagtacttgggggatgtgaacaatgtgaaagttgtgtatggacctgctgctcggttaagacccactgatgttccagagacatactattcatttaactatgaagcccttgcaaaaaatctttcttgccgggagccaaaccagcatttccggccttacctgaaacccttcttacccaagcgcttacacttcgctaaaagtgaccggattgagcccctgaccttctacctggaccctcagtggcaacttgcgttgaatccatcagagaggaaatattgtggaagtggatttcatggctctgacaacttgttttcaaacatgcaagctctttttattggctatggacctgccttcaagcatggtgctgaagttgactcctttgaaaatattgaagtctataacttaatgtgtgacttactgggtttgatcccagctcccaataatggaagtcatggcagcctcaaccaccttctaaagaaacccatttacaacccaagtcatcccaaagaagagggcttcctgtctcagtgtccaatcaaatcaacatccaatgacctcggctgcacatgtgacccttggattgtgccaatcaaggactttgagaaacagcttaatctgaccacagaagatgatgacatttaccatatgactgtaccctacgggaggccccggattctactgaagcagcaccacgtctgtctactccagcagcaacagttcttgaccggatacagcctggacctcctcatgcccctctgggcgtcttacaccttcctcaggaatgaccaattctccagagatgacttttccaactgtctgtaccaggatcttcggattccccttagtcccgtgcacaaatgttcctattacaaaagcaattctaaactaagttatgggttcctcacgccaccgagactaaatagagtttcaaatcacatatactctgaagcgctgcttacatctaatatagtgccaatgtatcagagttttcaagttatatggcactaccttcatgacaccctactgcaaaggtatgcccatgaaaggaacggcatcaatgttgtcagcggtcccgtgtttgactttgattatgacggacgctatgattccttagagatcctgaaacaaaacagcagagtcatccgaagccaggaaattctgattccgactcacttcttcattgtgctcaccagctgcaagcagctgtctgagactcccttggagtgctccgccttagagtcctcagcttacatactgcctcataggcctgataacattgagagctgtacgcatgggaagcgggagtcttcatgggtcgaggagttgctgaccttgcacagagctcgggtcacagacgtggaactcatcactggcctcagcttctaccaggaccgacaagagtcagtttcagaactgctgaggttgaaaacacatttgccaatcttcagccaagaagacactagtaa

SEQ ID NO: 30 - DNA, 1765 bp, Mus musculus
cgaagcttgccatgtctcccgcccctcgaccctcccgcagcctcctgctccccctgctcacgcttggcacggcgctcgcctccctcggctgggcccaaggcagcaacttcagccccgaagcctggctgcagcagtatggctacctacctccaggggacctgcgtacccacacacaacgctcaccccagtcactctcagctgccattgccgccatgcaaaagttctatggtttacaagtgacaggcaaggctgatttggcaaccatgatggccatgaggcgccctcgctgtggtgttccggataagtttgggactgagatcaaggccaatgttcggaggaagcgctatgccattcagggcctcaagtggcagcataatgagatcactttctgcattcagaattacacccctaaggtgggcgagtatgccacattcgaggccattcggaaggccttccgagtatgggagagtgccacgccactgcgcttccgagaagtgccctatgcctacatccgggagggacatgagaagcaggctgacatcatgatcttatttgctgagggtttccacggcgacagtacaccctttgatggtgaaggagggttcctggctcatgcctacttcccaggccccaatattggaggggatacccactttgattctgccgagccctggactgtccaaaatgaggatctaaatgggaatgacatcttcttggtggctgtgcatgagttggggcatgccctaggcctggaacattctaacgatccctccgccatcatggcccccttttaccagtggatggacacagagaacttcgtgttgcctgatgacgatcgccgtggcatccagcaactttatggaagcaagtcagggtcacccacaaagatgccccctcaacccagaactacctctcggccctctgtcccagataagcccaaaaaccccgcctatgggcccaacatctgtgacgggaactttgacaccgtggccatgctccgaggagagatgtttgtcttcaaggagcgatggttctggcgggtgaggaataaccaagtgatggatggatacccaatgcccattggccaattctggaggggcctgcctgcatccatcaatactgcctacgagaggaaggatggcaaatttgtcttcttcaaaggagataagcactgggtgtttgacgaagcctccctggaacccgggtaccccaagcacattaaggagctgggccgagggctgcccacggacaagatcgatgcagctctcttctggatgcccaatgggaagacctacttcttccggggcaataagtactaccggttcaatgaagaattcagggcagtggacagcgagtaccctaaaaacatcaaagtctgggaaggaatccctgaatctcccagggggtcattcatgggcagtgatgaagtcttcacatacttctacaagggaaacaaatactggaagttcaacaaccagaagctgaaggtagagccagggtaccccaagtcagctctgcgggactggatgggctgcccttcggggggccggcccgatgaggggactgaggaggagacagaggtgatcatcattgaggtggatgaggagggcagtggagctgtgagtgcggccgccgtggtcctgccggtactactgctgctcctggtactggcagtgggcctcgctgtcttcttcttcagacgccatgggacgcccaagcgactgctttactgccagcgttcgctgctggacaaggtcgttaactt

SEQ ID NO: 31 - DNA, 2789 bp, Mus musculus; identical to SEQ ID NO: 28

SEQ ID NO: 32 - DNA, 1080 bp, Mus musculus
cgatcgatatgagcctcttcctgcgaaagcgatgcctctgcctaggcttcctgctcttccatctcttaagtcaagtctctgcatctctgcgctgcccttctcggtgcccacccaagtgccccagtatatcaccgacctgcgcccccggggtgcgctcggtgctggacggctgctcctgctgtccggtgtgcgcccgccagcgcggggagagttgttctgagatgagaccctgtgaccagagcagtggtctctactgtgaccgcagcgcagaccccaacaaccagactggcatttgcatggttccagagggagacaactgtgtgttcgatggggtcatttaccgcaacggagagaagtttgagccgaactgtcagtacttctgcacctgcagagatgggcagattggctgtctgccccgctgccagctagacgtgctactgccgggtcctgactgcccagctccgagaaaagtcgcagtgccaggggagtgctgcgaaaagtggacctgtggctcagacgagcaggggacgcaggggacgctgggaggcttggcccttccagcctatagaccggaagccaccgtaggagttgaagtctctgactccagcattaactgcattgagcagacgacggagtggagcgcatgttccaagagctgtggaatgggcgtgtccacccgggtcaccaacaggaatcgccagtgtgagatggtaaaacagactcgtctctgcatcgttcggccttgtgaacaagagcccgaggaagtaacagacaagaaaggtaaaaagtgtctccgcaccaagaaatccctgaaagccatccacctacagttcgagaattgcactagcttgtacacctataagccccggttctgtggggtctgcagtgatggccgctgctgtaccccccacaacaccaaaaccatccaggtggagtttcagtgtctcccgggggaaatcatcaagaaaccagtcatggtcattggaacctgtacctgctactccaactgccctcagaacaatgaggccttcctccaagatctggagctgaagacaagcagaggagaaattgcggccgctt

SEQ ID NO: 33 - DNA, 1302 bp, Mus musculus
cgatcgatatgcgggcactgtgcctgctttgttgggctgttctcctgaacctggtgcgagcttgtccagagccctgtgactgtggggagaagtatggcttccagattgcagactgtgcctatcgtgacctagagggtgtgccaccgggcttcccggccaatgtgaccacactgagcctgtcagccaacaggctgccaggcctgccggagggagccttcagggaagtgcccctattgcagtcgctgtggctggcacacaatgagatccgctcggtggctattggtgctctggcccctctgagccatctcaagagtctggacctcagccacaacctcctctctgagtttgcctggagcgacctgcacaacctcagcgctctgcagctgctcaagatggacagcaacgagttagccttcatccctcgggacgcctttagcagcctcagcgccctgcgttccctgcagctcaaccacaaccgcctgcacgcgttggccgagggcaccttcgcaccgctcaccgcgctgtcccacttgcagatcaatgacaaccctttcgactgcacctgtggcatcgtgtggttcaagacatgggccctggcctcagcggtgtctattccagaacaggacaacattgcctgtactacaccccacgtcctgaagggtatcccactaggccgcctgccacccctgccctgctcagctccctcagtgcaactaagctaccagcccagccaagatggagcagagctacggcctggcttcgtgctggcactccactgtgacgtggatggacagccagtcccccagctccattggcacattcacaccccgggcggcacggtggagatcgccagtcctaatgtaggcactgatggacgtgccctgcctggtgcccttgcaaccagtgggcagccacgcttccaggcctttgccaatggcagcctgcttatccctgactttggcaagctggaggagggcacctatagctgcctggccaccaatgagctaggcagtgccgaaagctctgtaaatgtggcattggccaccccaggtgaggggggagaggatgctgtggggcacaagttccatggcaaagcagtggagggcaagggctgctatacggttgacaacgaggtacagccatccggaccggaagacaacgtggttatcatttacctcagccgtgctgggcccccagaagctgcaatagcagcagacgggaggcctgcgcagcagttctctggcatacttctgctaggccaaagcctgcttgttctctcctttttctacttcgcggccgctt

SEQ ID NO: 34 - DNA, 1125 bp, Mus musculus
cgatcgatatgtgtcccctgtggctactcaccttgctgctggccctgagccaggccttgccctttgagcagaagggtttctgggacttcaccttggatgatgggctgctcatgatgaatgatgaggaggcttcaggttcagacaccacttcaggtgtccccgacctggactctgtcacacctaccttcagtgccatgtgtcctttcggttgccactgccacctgcgggttgttcagtgctctgacttgggtctgaagactgtgcccaaggagatctcacctgacaccacactgctagacctgcagaacaatgacatttctgagcttcgcaaggatgacttcaaaggcctccagcacctctacgccctggtcttggtaaacaataagatctccaagatccatgagaaggcctttagccctctgcggaagctgcaaaaactctacatctccaagaaccacctggtggagattcctcccaacctgcccagctccctggtagaactacgaatccatgacaaccgtatccgcaaagtgcccaagggcgtgttcagcgggctccggaacatgaactgcattgagatgggcgggaatcccctggagaacagtggctttgaaccaggagcctttgatggcctgaagctcaattacctgcgcatctcagaggccaagctcactggcatccccaaagatctccctgagaccctgaacgaacttcacctggaccacaacaaaatccaggctattgagttggaggacctacttcgatactccaagctgtacaggttgggcttaggtcacaatcagattcggatgattgagaatgggagcctgagttttctgcctaccctgagggaacttcacttggacaacaacaagctgtcccgggtgcctgctggcctcccagatctcaagctcctccaggttgtctatctgcactccaacaacatcaccaaggtgggcatcaatgacttctgtcctatgggcttcggagtcaagagggcctactataatggcatcagcctcttcaacaaccctgtgccctactgggaagtgcagcctgccaccttccgctgcgttactgaccgcctggccatccaatttggaaattataagaaggcggccgctt

SEQ ID NO: 35 - DNA, 1350 bp, Mus musculus
cgaagcttgccatgctcccttttgcctcctgcctccccgggtctttgctgctctgggcgtttctgctgttgctcttgggagcagcgtccccacaggatcccgaggagccggacagctacacggaatgcacagatggctatgagtgggatgcagacagccagcactgccgggatgtcaacgagtgcctgaccatcccggaggcttgcaagggtgagatgaaatgcatcaaccactacgggggttatttgtgtctgcctcgctctgctgctgtcatcagtgatctccatggtgaaggacctccaccgccagcggcccatgctcaacaaccaaacccttgcccgcagggctacgagcctgatgaacaggagagctgtgtggatgtggacgagtgtacccaggctttgcatgactgtcgccctagtcaggactgccataaccttcctggctcctaccagtgcacctgccctgatggttaccgaaaaattggacccgaatgtgtggacatagatgagtgtcgttaccgctattgccagcatcgatgtgtgaacctgccgggctcttttcgatgccagtgtgagccaggcttccagttgggacctaacaaccgctcttgtgtggatgtgaatgagtgtgacatgggagccccatgtgagcagcgctgcttcaactcctatgggaccttcctgtgtcgctgtaaccagggctatgagctgcaccgggatggcttctcctgcagcgatatcgatgagtgcggctactccagttacctctgccagtaccgctgtgtcaacgagccaggccgattctcctgtcactgcccacaaggctaccagctgctggctacaaggctctgccaagatattgacgagtgtgaaacaggtgcacaccaatgttctgaggcccaaacctgtgtcaacttccatgggggttaccgctgtgtggacaccaaccgttgtgtggagccctatgtccaagtgtcagacaaccgctgcctctgccctgcctccaatcccctttgtcgagagcagccttcatccattgtgcaccgctacatgagcatcacctcagagcgaagtgtgcctgctgacgtgtttcagatccaggcaacctctgtctaccctggtgcctacaatgcctttcagatccgttctggaaacacacagggggacttctacattaggcaaatcaacaatgtcagcgccatgctggtcctcgccaggccagtgacgggaccccgggagtacgtgctggacctggagatggtcaccatgaattcccttatgagctaccgggccagctctgtactgagactcacggtctttgtgggagcctataccttcgcggccgctt

SEQ ID NO: 36 - DNA, 912 bp, Mus musculus; identical to SEQ ID NO: 19

SEQ ID NO: 37 - DNA, 2682 bp, Mus musculus
cgatcgatatgggcagggtcccgctggcctggtggttggcgctgtgctgctgggggtgtgcagcccataaggacacacagaccgaggctggcagcccgtttgtggggaacccagggaatatcacaggtgccagaggactcacggggacacttcggtgtgagctccaggttcagggggaaccccctgaggtggtgtggcttcgagatggacagatcctagaactggctgataacacccagacccaggtgcctctgggcgaagactggcaagatgaatggaaagttgtcagtcagctcagaatctcagccctgcaactttcagatgcaggggagtaccagtgtatggtgcatctagaaggacggacctttgtgtctcagccgggctttgtagggctggaaggtctcccgtacttcctggaggagcctgaggacaaagctgtgcctgccaacacccctttcaacctaagctgccaggcccagggacccccggaacccgtgaccctactctggcttcaagatgctgtccccctggccccagtcacaggacacagctcccagcacagtctgcaaactccaggcctgaacaagacatcttctttctcatgtgaagcccacaatgccaagggagtcaccacctcccgcacagccaccatcacagtgctcccccagaggcctcaccatctccacgtggtttccagacaacctacggagctagaggtagcttggacccctggcctgagtggcatctacccgctcacccactgcaacctgcaggccgtgctgtcagacgatggggtgggtatctggctgggaaagtcagatcctcctgaagaccccctcaccttgcaagtatcagtgcccccccaccagcttcggctggaaaagctccttcctcacaccccgtatcacatccggatatcctgcagcagcagccagggcccctcaccttggacccactggcttcctgtggagaccacagagggagtgcccttgggtccccctgagaacgttagcgccatgcggaatgggagccaggtcctcgtgcgttggcaggagccaagggtgcccctgcaaggcaccctgttagggtaccggctggcatatcgaggccaggacacccccgaggtacttatggatatagggctaactcgagaggtgaccttggaactgcggggggacaggcctgtggctaacctgactgtgtctgtgacagcctatacctcggctggggatgggccctggagccttcctgtgcccctagagccctggcgcccagggcaaggacagccactccaccatctggtgagtgaacccccacctcgcgccttctcgtggccttggtggtatgtactgctgggagcacttgtggctgccgcctgcgtcctcatcttggccctgttccttgtccatcggaggaagaaggagactcgatatggggaggtgtttgagccaaccgtggaaagaggtgaactggtagtcaggtaccgtgtccgaaagtcctacagccggcggaccactgaagccaccttgaacagtctgggcatcagtgaagagctgaaggagaaactacgagacgtcatggtagatcggcataaggtggccttggggaagaccctgggagaaggagaatttggcgctgtgatggaaggtcagctcaatcaggatgactccatcctcaaggtcgctgtgaagaccatgaaaattgccatctgcacaagatcagagctggaggatttcctgagtgaagctgtctgcatgaaggaatttgaccaccccaacgtcatgaggctcattggcgtctgttttcagggctctgacagagagggtttcccagaacctgtggtcatcttgcctttcatgaaacacggagacctacacagtttcctcctgtactcccggctcggggaccagccagtgttcctgcccactcagatgctagtgaagttcatggccgacattgccagtggtatggagtacctgagtaccaagagattcatacatcgggacctggctgccaggaactgcatgctgaatgagaacatgtccgtgtgtgtggcagacttcgggctctccaagaagatctacaacggggattactaccgccaagggcgcattgccaagatgccagtcaagtggattgctattgagagtctggcagatcgggtctacaccagcaagagcgatgtgtggtccttcggtgtgacaatgtgggagatcgccacccgaggccaaactccctatccaggggtggagaacagtgagatttacgactacctgcgtcaaggaaatcggctgaaacagcctgtggactgtctggacggcctgtatgccctgatgtctcggtgctgggaactgaaccctcgagaccggccaagttttgcggagctccgggaagacttggagaacacactgaaggctctgccccctgctcaggagccagatgaaatcctctatgtcaacatggatgagggcggaagccaccttgaaccccgtggggctgctggaggagctgaccccccaacccaacctgatcctaaggattcctgtagctgtctcactgcagctgacgtccactcagctggacgctatgtcctttgtccttctacagccccaggacccactctgtctgctgacagaggctgcccagcacctccagggcaggaggacggagccgcggccgctt

SEQ ID NO: 38 - DNA, 1749 bp, Mus musculus
cgatcgatatgcttgggattttctttctgggtgtgctggctccagctagcctggggctctccgcactagccaagctgcagcccacaggcagtcaatgcgtggagcatgagtgcttcgcgcttttccagggccccgcgaccttcctcgatgccagccaggcctgccagcgcctgcaaggacatttgatgacagtgcgctcctcagtggctgccgatgtcatctcccttctgctgagccagagcagtatggatttagggccctggatcggtttacagctcccgcagggctgtgacgacccggtgcatctcgggcccctgcgcggcttccagtgggttactggcgataaccacaccagttacagcaggtgggcgcggcccaacgaccagacggctccactctgcggccctctgtgcgtcacggtctcgacagcaactgaagctgcacccggcgagccggcctgggaagagaagccatgcgagactgagacccagggtttcctctgtgagttttacttcacagcttcctgcaggcctctgacggtgaatactcgcgatcctgaggctgcccacatctctagtacctacaacaccccgttcggggtcagtggtgcggactttcaaacgctgccggtaggcagttccgccgcggtggagccccttggcttggagctggtgtgcagggccccgcccggaacttcagagggacactgggcttgggaagcgacaggagcctggaattgcagcgtggagaatggtggctgtgagtacttgtgcaataggagcacgaatgaacccagatgcctctgccccagagacatggacctgcaggccgatggacgttcgtgtgcaagacctgtggttcaatcgtgcaacgaactctgcgagcatttttgtgtcagcaacgctgaagtgccaggctcttactcctgtatgtgtgagacaggctaccagttggctgcagacggacaccggtgtgaggacgtggatgactgtaagcaggggcccaatccatgtccccagctctgtgttaacaccaagggcggcttcgaatgcttctgctatgatggctatgagttggtggatggagagtgcgtggagcttctggatccgtgtttcggatctaactgcgagtttcagtgccagccagtgagccccaccgactaccgatgcatctgcgctccgggcttcgcacccaagccggatgaaccgcacaagtgcgaaatgttctgcaatgaaacttcgtgcccagcagactgtgaccctaactctcctactgtttgtgaatgccctgaaggcttcatcctggacgagggttccgtatgcacggacattgatgagtgcagtcaaggtgaatgcttcaccagtgaatgtcgaaacttccctggctcctatgagtgtatctgcgggcctgacacagcccttgctggtcagattagcaaagactgtgaccccatccctgttagggaagacaccaaggaagaggagggctctggggagcctccagtcagccctacgccaggctctccgacaggtcccccttctgcaaggccagtgcactctggcgtgctcattggcatctccattgccagcctgtccctggtggtggcgcttttggcgcttctctgtcacctgcgcaagaagcagggcgctgctcgcgcagagctggagtacaagtgtgcatcttccgccaaggaggtagtgctgcagcacgtcaggactgatcggacgctgcagaagttcgcggccgctt

SEQ ID NO: 39 - DNA, 360 bp, Mus musculus
cgatcgatatgggggctctggagccctcctggtgccttctgttccttcctgtcctcctgactgtgggaggattaagtcccgtacaggcccagagtgacactttcccaagatgcgactgttcttccgtgagccctggtgtactggctgggattgttctgggtgacttggtgttgactctgctgattgccctggctgtgtactctctgggccgcctggtctcccgaggtcaagggacagcggaagggacccggaaacaacacattgctgagactgagtcgccttatcaggagcttcagggtcagagaccagaagtatacagtgacctcaacacacagaggcaatattacagagcggccgctt

SEQ ID NO: 40 - DNA, 533 bp, Mus musculus
catcgatatggcgccctctttctatcactatctgcccgtgcccatggatgagatgggggggaagcaaggatggggcagccaccggcagtggctgggggccgcgatcttggtggtcctgttcggggttaccttagtcatcctgacaatctacttcgccgtcacagcgaacagcgtggcctgtagagacgggttgcgagcgcaggctgagtgccggaacaccacgcacctgttgcagcgccagctcacccgcacccaggacagtctgctgcaggccgagacacaggcaaactcctgcaacctgaccgtggtgacccttcaggagtccctggagaagaaggtgtctcaagccctggagcagcaggcccgcatcaaggagcttgagaatgaagtcacgaagctgaaccaggagctggagaatctgaggatccaaaaggagacttctagcacagtgcaggtgaactctggcagctccatggtggtctccagcctactggtgctcaaagtgtcactgtttctgctctttgcggccgctt

SEQ ID NO: 41 - DNA, 4451 bp, Mus musculus
atcgatatggtacccatccgacctgccctcgcgccctggcctcgtcacctgctgcgctgcgtcttgcttctcgggggactgcgtctcggccacccggcggactccgccgccgccctcctggagcctgatgtcttcctcatcttcagccaggggatgcagggctgtctggaggcccagggtgtgcaggtccgagtcaccccagtctgcaatgccagtctccctgcccagcgctggaagtgggtctcccggaaccgactcttcaacctgggtgccacacagtgcctgggtacaggctggccagtcaccaacaccacagtttccttgggcatgtatgagtgtgacagagaggccttgagtcttcgatggcagtgtcgtacactaggggaccagttgtccctgcttctgggggctcgtgcaagcaatgcatccaagcctggcaccctggagcgcggtgaccagacccgcagtggccattggaacatctatggcagtgaagaagacctatgtgctcgaccttactatgaggtctacaccatccagggaaactcacacggaaagccgtgcactatccccttcaaatacgacaaccagtggttccacggctgcaccagcactggcagagaagatgggcacctgtggtgtgccaccacccaggactacggcaaagatgagcgctggggcttctgccccatcaagagtaacgactgtgagaccttctgggacaaagaccagctgactgacagctgttaccagtttaacttccaatccacactgtcctggagggaggcctgggccagctgcgagcagcagggtgcagacttgctgagtatcacggagatccacgagcagacctacatcaacgggctcctcacgggctacagctccacgctatggattggccttaatgacctggataccagtggaggctggcagtggtcagacaactcacccctcaagtacctcaactgggagagtgatcagccggacaacccaggtgaggagaactgtggagtgatccggactgagtcctcaggcggctggcagaaccatgactgcagcatcgccctgccctatgtttgcaagaagaaacccaacgctacggtcgagcccatccagccagaccggtggaccaatgtcaaggtggaatgtgaccccagctggcagcccttccagggccactgctaccgcctgcaggccgagaagcgcagctggcaggagtccaagagggcgtgtctgcggggtgggggtgacctccttagcatccacagcatggctgagctggagttcatcaccaaacagatcaagcaagaggtggaggagctatggattggcctcaatgatttgaaactgcagatgaattttgagtggtccgacgggagcctcgtgagcttcacccactggcacccctttgagcccaacaactttcgtgacagcctggaggactgtgtcaccatctgggggccggaaggacgctggaacgacagtccctgtaaccagtccttgccatccatttgcaagaaggcaggccggctgagccagggcgctgcggaggaggaccacggctgccggaagggttggacgtggcatagcccatcctgctactggctgggagaggaccaagtgatctacagtgatgcccggcgcctgtgtactgaccatggctctcagctggtcaccatcaccaacaggtttgagcaggccttcgtcagcagcctcatctataactgggagggcgaatacttctggacagccctgcaagatctcaacagtactggctccttccgttggctcagtggggatgaagtcatatatacccattggaatcgagaccagcctgggtacagacgtggaggctgtgtggctctggccactggcagtgccatgggactgtgggaggtgaagaactgcacatcgttccgggctcgctacatctgccgacagagcctgggcacaccggtcacaccagagctgcctgggccagaccccacgcccagcctcactggctcctgtccccagggctgggtctcagaccccaaactccgacactgctataaggtgttcagctcagagcggctgcaggagaagaagagttggatccaggccctgggggtctgccgggagttgggggcccagctgctgagtctggccagctatgaggaggagcactttgtggcccacatgctcaacaagatctttggtgagtcagagcctgagagccatgagcagcactggttttggattggcctgaaccgcagagaccctagagagggtcacagctggcgctggagcgacggtctagggttttcctaccacaattttgcccggagccgacatgatgacgatgatatccgaggctgtgcagtgctggacctggcctccctgcagtgggtacccatgcagtgccagacgcagcttgactggatctgcaagatccctagaggtgtggatgtgcgggaaccagacattggtcgacaaggccgtctggagtgggtacgctttcaggaggccgagtacaagttttttgagcaccactcctcgtgggcgcaggcacagcgcatctgcacctggttccaggcagatctgacctccgttcacagccaagcagaactggacttcctggggcaaaacctgcagaagctgtcctcagaccaggagcagcactggtggatcggcctgcacaccttggagagtgacggacgcttcaggtggacagatggttctattataaacttcatctcttgggcaccgggaaaacctagacccattggcaaggacaagaagtgtgtatacatgacagccagacaagaggactggggggaccagaggtgccatacggctttgccctacatctgtaagcgcagcaatagctctggagagactcagccccaagacttgccaccttcagccttaggaggctgcccctccggttggaaccagttcctcaataagtgtttccaaatccagggccaggacccccaggacagggtgaaatggtcagaggcacagttctcctgtgaacagcaagaagcccagctggtcaccattgcaaaccccttagagcaagcatttatcacagccagcctccccaacgtgacctttgacctttggattggcctgcatgcctctcagagggacttccagtggattgaacaagaacccctgctctataccaactgggcaccaggagagccctctggccccagccctgctcccagtggcaccaagccgaccagctgtgcggtgatcctgcacagcccctcagcccacttcactggccgctgggatgatcggagctgcacagaggagacgcatggcttcatctgccagaagggcacagacccctcgctaagcccatccccagcagcaacaccccctgccccgggcgctgagctctcctatctcaaccacaccttccggctgctgcagaagccactgcgctggaaagatgctctcctgctgtgtgagagccgaaatgccagcctggcacacgtgcccgatccctacacacaagccttcctcacacaggctgcacgggggctgcaaacaccactgtggatcgggctggccagtgaggagggctcacggaggtattcctggctctcagaggagcctctgaattatgtgagctggcaagatgaggagccccagcactcgggaggctgtgcctacgtggatgtggatggaacctggcgcaccaccagctgtgataccaagctgcagggggcagtgtgtggggtgagcagggggcccccaccccgaaggataaactaccgtggcagctgtcctcagggctcggctgactcgtcctggattcccttcagggagcattgctattctttccacatggaggtgctgttgggccacaaggaggcgctgcagcgctgtcagaaagctggtgggacggttctgtccattcttgatgagatggagaatgtgtttgtctgggagcacctgcagacagctgaagcccaaagtcgaggtgcctggttgggcatgaacttcaaccccaaaggaggcacgctggtctggcaagacaacacagctgtgaactattctaactgggggccccctggcctgggccctagcatgctaagccacaacagctgctactggatccagagcagcagcggactgtggcgccccggggcttgtaccaacatcaccatgggagttgtctgcaagctccctagagtggaagagaacagcttcttgccatcagcagccctccccgagagcccggttgccctggtggtggtgctgacagcggtgctgctcctcctggccttgatgacggcagccctcatcctctaccggcgccgacagagtgcggagcgtgggtccttcgagggggcccgctacagtcgcagcagccactctggccccgcagaggccaccgagaagaacattctggtgtctgacatggaaatgaacgaacagcaagaagcggccgc

SEQ ID NO: 42 - DNA, 810 bp, Mus musculus
cgatcgatatggcagacacgttttcgcttaacgatgccttagctggctctggaaacccaaaccctcaaggatatccgggtgcatgggggaaccagcctggggcagggggctacccaggggctgcctatcctggggcctatccaggacaggctcctccaggggcctacccaggacaggctcctccaggggcctatccaggacaggctcctcctagtgcctaccccggcccaactgcccctggagcttatcctggcccaactgcccctggagcttatcctggctcaactgcccctggagccttcccagggcaacctggggcacctggggcctaccccagtgctcctggaggctatcctgctgctggcccttatggtgtccccgctggaccactgacggtgccctatgacctgcccttgcctggaggagtcatgccccgcatgctgatcacaatcatgggcacagtgaaacccaacgcaaacaggattgttctagatttcaggagagggaatgatgttgccttccactttaacccccgcttcaatgagaacaacagaagagtcattgtgtgtaacacgaagcaggacaataactggggaaaggaagaaagacagtcagccttcccctttgagagtggaaaaccattcaaaatacaagtcctggttgaagctgaccacttcaaggttgcggtcaacgatgctcacctactgcagtacaaccatcggatgaagaacctccgggaaatcagccaactggggatcagtggtgacataaccctcaccagcgctaaccacgccatgatcgcggccgctt

SEQ ID NO: 43 - DNA, 1073 bp, Mus musculus
catcgatatgtctgaggagccaccaaggccctctaggtggcagtggggacaagtcccatctttcagccacccaaactgcccgggtctccctgcccaggactcacccaccaacaagcttctgtacgcgaaggagatccctgagtaccggaagaccgtacagcgctattataaacagatccaagacatgacgccgctcagcgagcaggaaatgaacgcacacctggccgaggagtctcggaaataccagaatgagttcaacacaaacgtggccatggctgagatttataaatatgctaagaggtatcgaccacagatcatggctgccctggaggccaaccccacagcccgcaggacccagctacagcacaagtttgaacaggtggtggctctgatggaaaacaatatctatgagtgttacagcgaggcctgatgcagaagagtgaccaggagcttcggccagggagacggcgtgcaggccacttggcctccacttggtttcttccccacatctctcacttgggctgggaactgacagaggagcctgctgggctaggagtgggggacactggcctcttagtgcccggctgccgagctcttggccttgtcccctggggcatctctgtcccctccacctgcccaagacccaactctaggatgaaggccttgaatatcgatcgctgccagtccctaataagactttccctgccaaccaggacagcctggaccatgcctgcctgttcactgtttcaggctgctcagcacacattgggagaggtggccatatcccagaacactacctcatccacctggcagagggaatttctgcttcagccaccaagcagttgtctgtgtccctcatccagagggggccttggccaccaacagttccaaaccaggtcagctgttagccgtctcattggccagtggcagcatgggcagtgcccattgcccacagaacggtggagagagggggacaggctggggggttcctggccccaggaaagggaggaaggcgaggatgcagggctgtagctggactactcagtcttcctggaagtgtttcgaggccgctt

SEQ ID NO: 44 - DNA, 836 bp, Mus musculus
catcgatatggcggcggcgctgctgctggcgctggccttcacgctcttgagcggccaaggcgcctgcgcggcggcgggcaccatccaaacctctgtccaggaagtcaactccaaaacacagcttacctgctctttgaacagcagtggcgttgacatcgttggccaccgctggatgagaggtggcaaggtactgcaggaggacactctgcccgacctgcatacgaagtacatagtggacgcagatgaccgctctggggaatattcctgcatcttccttcctgagcctgtgggcagaagcgagatcaatgtggaagggccacccaggatcaaggtcggaaagaaatcagagcattccagtgagggagagcttgcgaaactggtctgcaagtccgatgcatcctaccctcctattacagattggttctggtttaagacctctgacactggggaagaagaggcaatcaccaatagcactgaagccaatggcaagtatgtggtggtatccacgcctgagaagtcacagctgaccatcagcaaccttgacgtaaatgttgaccctggcacctacgtgtgtaatgccaccaacgcccagggcactactcgggaaaccatctcactgcgtgtgcggagccgcatggcagccctctggcccttcctaggcatcgtggctgaggtcctggtgttggttaccatcatctttatctatgagaagaggcggaagccagaccagaccctggacgaggatgaccctggcgccgccccactgaagggcagtggaactcacatgaatgacaaggacaagaatgtacgccagaggaacgccaccgcggccgctt

SEQ ID NO: 45 - DNA, 1879 bp, Mus musculus
aatctagaatggccacgaaggagaagctgcaatgtctgaaagacttccacaaagacatcctgaagccttctccagggaagagcccaggcacacggcctgaagatgaggcggacgggaagccccctcagagggagaagtggtccagcaagatcgactttgtgctgtctgtggccggaggcttcgtgggtttgggcaacgtctggcgtttcccgtacctctgctacaaaaatggtggaggtgcgttcctcataccgtattttattttcctgtttgggagcggcctgcctgtgtttttcttggaggtcatcataggccagtacacatcagaagggggcatcacctgctgggagaagatctgtcctttgttctctggcattggctacgcatccatcgtcattgtgtccctcctgaacgtgtactacatcgtcatcctggcctgggccacatactacctattccactctttccagaaggatcttccctgggcccactgcaaccatagctggaacacaccacagtgcatggaggacaccctgcgtaggaacgagagtcactgggtctcccttagcactgccaacttcacctcacccgtcatcgagttctgggagcgcaatgtgctcagcctgtcctccggaatcgacaacccaggcagtctgaaatgggacctcgcgctctgcctcctcttagtctggctcgtctgttttttctgcatctggaagggtgttcgatccacaggcaaggttgtctacttcaccgctactttcccgtttgccatgcttctggtgctgctggtccgtggactgaccctgccaggtgctggtgaaggcatcaaattctacctgtaccctgacatcagccgccttggggacccacaggtgtggatcgacgctggaactcagatattcttttcctacgcaatctgcctgggggccatgacctcactgggaagctataacaagtacaagtataactcgtacagggactgtatgctgctgggatgcctgaacagtggtaccagttttgtgtctggcttcgcaattttttccatcctgggcttcatggcacaagagcaaggggtggacattgctgatgtggctgagtcaggtcctggcttggccttcattgcctacccaaaagctgtaaccatgatgccgctgcccaccttttggtctattctgtttttcattatgctcctcttgcttggactggacagccagtttgttgaagtcgaaggacagatcacatccttggttgatctttacccgtccttcctaaggaagggttatcgtcgggaaatcttcatagccatcttgtgtagcatcagctacctgctggggctgacgatggtgacggagggtggcatgtatgtgtttcaactctttgactactatgcagctagtggtgtatgccttttgtgggttgcattctttgaatgttttgttattgcctggatatatggcggtgataacttatatgacggtattgaggacatgattggctatcggcctgggccctggatgaagtacagctgggctgtcatcactccagctctttgtgttggatgtttcgtcttctcgcttgtcaagtatgtacccctgacctacaacaaagtgtaccggtacccggattgggcaattgggctgggctggggcctggccctttcctccatgctgtgtatccccttggtcattgtcatcctcctctgccggacggagggaccgctccgcgtgagaatcaaatacctgataacccccagggagcccaaccgctgggctgtggagcgtgaaggggccacaccctttcactcccgagtaaccctcatgaacggcgcactcatgaaacccagtcacgtcattgtggagaccatgatgactagtaa

SEQ ID NO: 46 - DNA, 1162 bp, Mus musculus
aatctagaatggtgtccactagcatcccggaggttaaagctctccgcagctcagtctctgactatgggaactatgatatcatagtccggcattacaactacacaggcaagttgaacatcggggcggagaaggaccatggcattaaactgacttcagtggtgttcattctcatctgctgcttcatcatcctagagaatatatttgtcttgctaactatttggaaaaccaagaagttccaccggcccatgtactatttcataggcaacctagccctctcggacctattagcaggcgtggcttacacagctaacctgctgttgtctggggccaccacttacaagctcacacctgcccagtggtttctgcgggaagggagtatgtttgtggctctctctgcatcagtcttcagcctccttgccatcgccattgagcgctacatcaccatgctgaagatgaaactacacaacgggagcaacagctcgcgctcctttctgctgatcagcgcctgctgggtcatctccctcatcctggggggcctgcccatcatgggctggaactgcatcagctcgctgtctagctgctccaccgtgctcccgctctaccacaagcactatattctcttctgcaccaccgtcttcactctgctcctgctttccatcgtcatcctctactgcaggatctactccttggtcaggactcgaagccgccgcctgaccttccgcaagaacatctccaaggccagtcgcagttctgagaagtctctggccttgctgaagacggtgatcattgtcttgagtgtcttcattgcctgctgggcccctctcttcatcctactactgttagatgtgggctgcaaggcgaagacctgtgacatcctgtacaaagcagagtacttcctggttctggctgtgctgaactcaggtaccaaccccatcatctacactctgaccaacaaggagatgcgccgggccttcatccggatcgtatcttgttgcaaatgccccaacggagactctgctggcaaattcaagaggcccatcatcccaggcatggaatttagccgcagcaaatcagacaactcctctcacccccagaaggacgatggggacaacccagagaccattatgtcgtctggaaacgtcaattcttcttccactagtaa

SEQ ID NO: 47 - DNA, 1554 bp, Mus musculus
atctagaatggctgaggttggaggtaccattcctagatcgaaccgtgagctccaacgctgtgtgttactaaccaccaccatcatgtccatccccggagtcaacgcgtccttctcctccactccggagaggctgaacagcccggtgaccattcccgcagtgatgttcatcttcggggtggtgggcaacctggtggccatcgtagtattgtgcaagtcgcgcaaggagcagaaagagacgaccttttacactctagtatgtgggctggctgtcactgaccttctgggcaccttgttggtaagcccggtgaccatcgccacatacatgaagggccagtggcccggagaccaggcactgtgtgactatagcaccttcatcctacttttcttcggtctgtcgggtctcagcatcatctgtgccatgagcatcgagcgctacctggccatcaaccacgcctacttctacagccactacgtggacaagcggctggccggcctcacactcttcgccatctatgcatctaacgtgctgttctgcgcgctgcccaacatgggcctgggcagatccgagcggcagtacccgggcacctggtgcttcatcgactggaccaccaacgtaacggcctacgccgccttctcttacatgtacgccggcttcagctccttcctcatccttgccaccgtgctctgcaacgtgctggtgtgcggcgcgctgctccgcatgcaccgccagttcatgcgccgcacctcgttgggcacggagcagcaccatgcggctgccgccgccgcggtagcttcggtggcctgtcggggccacgctggggcctccccagccctgcagcgcctcagcgactttcgccgccgcaggagtttccggcgcatcgcgggtgcggagatccagatggtcatcttactcatcgccacctctctggtggtgctcatctgctccattccgctcgtggtgcgagtgttcattaaccagttatatcagccaaacgtggtgaaagacatcagcagaaacccagatttgcaggccatcaggattgcttctgtgaaccccatcctggacccctggatttacatccttcttcggaagactgtgctcagtaaagccatagagaagatcaagtgcctcttctgccgcattggcggttccggcagagacagctcggcccagcactgctcagagagtcggaggacatcttccgccatgtccggccactctcgctccttcctcgcccgggagttaaaggagatcagcagcacgtcccagaccctcctgtacctgccagacctgactgaaagcagcctcggaggcaggaatttgcttccaggttcgcatggcatgggcctgacccaagcagacaccacctcgctgagaactttgcgaatttccgagacctcagactcctcccagggccaggactctgagagtgtcctgttggtggatgaggttagtgggagccacagagaggagcctgcctctaaaggaaactctctgcaagtcacattccccagtgaaactctgaaattatctgaaaaatgtataactagtaa

SEQ ID NO: 48 - DNA, 1108 bp, Mus musculus
aatctagaatggcagctgcctctacttccagccctgtaatttcacagccccagttcacagccatgaacgaacaacagtgcttctacaatgagtctatcgccttcttttataaccggagtgggaaatatctagccacagaatggaacacagtgagcaagctggtgatgggactgggcatcactgtttgcgtgttcatcatgttggccaatctcctggtcatggtggcaatctacgtcaaccgccgcttccatttccctatttattacttgatggccaacctggctgctgcagacttcttcgctggattggcctacttctacctgatgttcaatacaggacctaatacccggagactgactgttagcacgtggctcctccggcagggcctcattgacaccagcctgacagcttctgtggccaacctgctggctattgctatcgagaggcacatcacggttttccgcatgcagctccatacacgaatgagcaaccggcgcgtggtggtggtgattgtagtcatctggactatggccattgtgatgggtgctatacccagtgtgggctggaactgcatctgtgatatcgatcactgttccaacatggcacccctctacagtgactcctacttagtcttctgggccattttcaacctggtgacctttgtggtcatggtggttctctacgctcacatctttggctatgttcgccagaggactatgaggatgtctcggcatagttctggacccaggaggaatcgggacaccatgatgagccttctgaagactgtggtcattgtgcttggtgcctttattgtctgctggactccgggattggtcttgttattgctggatgtgtgctgcccgcagtgcgatgtcctggcctatgagaagttcttcctcctcctggccgagttcaactctgctatgaaccccatcatctactcctaccgcgacaaagagatgagcgccaccttcaggcagatcctgtgttgccagcgcaacgagaaccctaatggccccacggaaggctctgaccgctctgcctcctccctcaaccacaccattctggctggagttcacagcaacgaccactctgtggttactagtaa

SEQ ID NO: 49 - DNA, 1944 bp, Mus musculus
cgatcgatatggctgaggaggcggcgcctagcgagtcccgggccgccggccggctgagcttggaactttgtgccgaagcactcccgggccggcgggaggaggtggggcacgaggacacggccagccaccgccgcccccgggctgatccccggcgttgggctagcgggctgctgctgctgctttggttgctggaggctcctctgcttttgggggtccgagcgcaggcggcgggccaggtatccgggccgggccagcaagccccgccgccgccccagccccagcagagcgggcagcagtacaacggcgaacggggcatctccatcccggaccacggctactgccagcccatctccatcccgctgtgcacggacatcgcgtacaaccagaccatcatgcccaacctgctgggccacacgaatcaggaggacgccggtctagaggtgcaccagttctaccctctggtgaaggtgcagtgctccgccgagctcaagttcttcctgtgctccatgtacgcgcctgtgtgcaccgtactggagcaggcgctaccgccctgccgctccctgtgcgaacgcgcacgccagggctgcgaggcgctcatgaacaagttcggcttccagtggccagacacactcaagtgcgagaagttcccggtgcacggcgcaggagagctgtgcgtgggccagaacacgtccgacaaaggcaccccaactccctccttgctaccagagttctggaccagtaatccgcagcacggcggcggtggttaccgcggcggctacccggggggtgccgggacggtggagcggggaaagttctcctgcccgcgcgccctcagggtgccctcctacctcaactaccactttctgggggagaaggactgcggcgcaccctgcgaacccaccaaggtttacgggctcatgtacttcgggccagaggagctgcgcttctcgcgcacctggataggcatctggtccgtgctgtgctgcgcctccacgctcttcacggtgctcacgtacctagtggacatgcggcgcttcagctacccagaacggcccatcattttcctgtccggctgttacacagcggtggcggtggcctacatcgccggctttctgttggaggaccgggtggtgtgcaacgacaagtttgcagaggacggggcgcgcacggtggcgcagggcactaagaaagaaggctgcactatactctttatgatgctctacttcttcagcatggccagctccatctggtgggtgatcctgtccctcacctggttcctggcagccggcatgaagtggggccacgaagccatcgaggccaacttacagtatttccatttagccgcctgggctgtgccagccatcaaaactataaccatcttggcgttgggccaggtggatggcgacgtactgagcggagtgtgttttgtggggctcaacaacgtggacgcactgcgtggctttgtgctggcgcctctcttcgtttatctgttcattggcacttctttcctgctggctggtttcgtgtcactcttccgcatccgcaccatcatgaagcatgacggcaccaagacagagaagctggagaagctcatggtgcgcatcggagtcttcagtgtcctctacactgtgccggccaccatcgtcatcgcctgctacttctatgaacaggcctttcgggaccagtgggagcgcagctgggtggcccagagctgcaagagttatgccatcccttgccctcacctccagggaggtggaggagtcccaccacacccgcctatgagcccagactttacagtcttcatgatcaagtatctcatgacgctgattgtgggcatcacatcgggcttctggatctggtccggcaagacactgaattcctggaggaagttctacacgaggcttaccaacagcaaacagggggagactaccgtcgcggccgctt

SEQ ID NO: 50 - DNA, 552 bp, Mus musculus
cgatcgatatgtcactgtccagtcgcctgtgtctcctcactattgtcgccctgattctgcccagcagagggcagacaccaaaaaagcccacatccatttttacagcggaccagacttctgcgactactcgtgacaatgtcccagatccagatcaaaccagcccaggagtccagaccacccctctcatctggaccagagaagaagccacaggaagccagacagcagcccaaaccgagacccagcaactgacaaaaatggccacctcgaatccagtgtcagatccagggccacatacaagcagcaagaaaggtacccctgcagtctccaggatcgagcctctcagcccatccaaaaacttcatgcctccatcctacattgaacatccactggattcgaatgagaacaaccccttctactacgatgatactaccctccggaaacggggactgctggtggctgcggtgctgttcatcacgggaattatcattctcactagtgggaagtgtaggcagttgtctcaattttgcctgaatcgccacagggcggccgctt

SEQ ID NO: 51 - DNA, 2914 bp, Mus musculus
catcgatatggttaactccagacgcgtgcagccgcagccgcccggggacgcgggacgctcgcccgcgccgcgagcgtccggacccgggcgcctggtggcgggaggcgccggcctagctgtccccggcggcctcggggagcagcggggcctggagatcgagatggagcgcatccggcaggcggccgctcgggatcccccggccggagcctcggcctcgccgtctcctccgctttcgtcctgctccaggcaagcgtggagccgcgacaacccgggctttgaggcagaggaggatgacgacgacgacgaggtggaaggagaagaaggagggatggtggtagagatggatgtggagtggcgcccgggcagtcggaggtcggcctcctcctcggccgtgagctcggtgggcgcccgcggccgagggctcgggagctaccgcggcgcggctcacctgagcgggaggcggcgccggctagaggaccagggcgcgcagtgtcccagccccgcgggcggcggggacccgctgcatcgccacctcccgctggagggccagccaccccgagtggcctgggcagagaggctggtgcgagggctgcgaggtctctggggaacaagactcatggaagagagcaacgccaaccgagagaagtacctgaaaagtgtgttacgggagctggtcacttacctctttttcctcgtagtcttgtgcatcttgacctacggcatgatgagctccaatgtgtactactacactcggacactgtcacagctattcatagacaccccagtgtcgaaaacagagaaaaccaactttaaaactctttcttccatggaggacttctggaagttcaccgaaggctccttcctggatgggctgtactggaaggcacagaccagcaaccacacgcaagctgacaaccgaagctttatcttctatgagaaccttctgctaggagtgccgcgtctacgccaactccgagtcagaaacggatcctgctccatccctcaggacctgcgagatgaaattaaagagtgctatgacgtctactccgtcagcagtgaggacagagctccatttggaccgcggaatggaactgcgtggatctacacaagtgagagggagctgaatgggagcagtcactgggggatcattgcgtcgtacagtggagcgggttactacctggatctgtccggaaccagggaggagacagccgcccagcttgcgggcctcaggaggaacttctggctggaccggggcacgcgggcagctttcatagacttctcggtgtataacgcaaacattaacctgttctgtgtggtcaggttattggcggagttcccagcaacgggtggcgtggtaccctcttggcagtttcagcctgtaaaactgatccgctatgtcacagcctttgatttcttcctggcagcctgtgagatcatcttttgtttctttatcatttactatgtggtggaagagatattggaaattcggattcacagactgagctatttcaggagtttctggaattgtctggatgttgtgattgtcgtgttatctgtagtagctatggtgattaacatttaccgaatgtcaaatgcagaggggctgctacagtttctcgaagatcaaaattctttccccaactttgagcatgtggcatactggcaaatacagttcaacaatatagctgctgtcatggtatttttggtctggattaagctcttcaaattcatcaattttaataggaccatgagccagctctccacaaccatgtctcgatgtgccaaagacctcttcggcttcaccataatgttctccatcatcttcttggcatacgcacagctggcataccttgtcttcggcacccaggtcgatgacttcagcactttccaagaatgtatcttcacccagttccgcatcattttgggtgatatcaacttcgcagagatcgaggaagctaaccgagttttggggccactttattttactacatttgtgttctttatgttcttcattcttttgaatatgttcctggcgatcatcaatgattcgtactctgaagtgaaatccgatctggcccagcagaaagcagaaatggaactctcagaccttatcagaaagggctgccaaaaagcactggtcaaactaaaactgaaaagaaacactgtagatgccatctcagagagtctccggcaaggtggtggcaaactgaactttgatgagcttcggcaagacctgaaagggaagggccatacagatgcagagattgaggccatattcactaaatatgaccaggacggcgaccaggaactggctgagcgtgagcatcaacagatgagagatgacttggagaaagagagggaggacctagacttggaacacagctctttaccacgtccgatgagcagcagaagtttccccagaagcctggatgactctgaggaggaggatgacgaagacagtggccatagctccaggaggaggggaagcatctccagtggggtttcctatgaagagttccaagtactggtgaggcgcgtggaccgcatggagcactccattggcagcatcgtttctaagattgacgccgtgattgtcaagctggagatcatggagcgggccaagctgaagagacgagaggtgttaggacggctgctggatggcgtggctgaggatgcgcgactgggtcgggacagtgagatccacagggagcagatggagcgcctggtgcgggaagagctggagcgctgggaatcggatgatgcagcttcgcaaacaggtcatggtgtaagcacacaagtgggactcggtggccagccgcaccccagaaactcgcgccctccttcctcccagtctgcagagggcctggaaggtggaggtggaaatggaagtgccaacgtccatgccgcaggcctt

SEQ ID NO: 52 - DNA, 293 bp, Mus musculus
catcgatatggcatctcccggccacatcctggctctgtgtgtgtgtctcctctccatggccagtgcagaagctccacaggaaccggatccattcacctacgattaccacaccctgcggatcggcggcctcactatcgctgggatcctcttcatcttgggcatccttatcatccttagcaagagatgtcgatgcaaattcaaccaacagcagagaactggggaacccgacgaagaggagggaactttccgcagctccatccgccgtctgtcatcccgcaggcgggcggccgctt

SEQ ID NO: 53 - DNA, 2168 bp, Mus musculus
ctcaacatgcaggctggtgccaatgaagatgactactatgacggggcatggtgtgctgaggacgagtcgcagacccagtggatcgaggtggacacccgaaggacaactcggttcacgggcgtcatcactcagggccgtgactccagcatccatgacgacttcgtgactaccttctttgtgggcttcagcaatgacagccagacctgggtgatgtacaccaatggctacgaggaaatgaccttctatggaaatgtggacaaggacacacctgtgctgagcgagctccctgagccagttgtggcccgtttcatccgcatctatccactcacctggaacggtagcctgtgcatgcgcctggaggtgctaggctgccccgtgacccctgtctacagctactacgcacagaatgaggtggtaactactgacagcctggacttccggcaccacagctacaaggacatgcgccagctgatgaaggctgtcaatgaggagtgccccacaatcactcgcacatacagcctgggcaagagttcacgagggctcaagatctacgcaatggaaatctcagacaaccctggggatcatgaactgggggagcccgagttccgctacacagccgggatccacggcaatgaggtgctaggccgagagctcctgctcctgctcatgcaatacctatgccaggagtaccgcgatgggaacccgagagtgcgcaacctggtgcaggacacacgcatccacctggtgccctcgctgaaccctgatggctatgaggtggcagcgcagatgggctcagagtttgggaactgggcactggggctgtggactgaggagggctttgacatcttcgaggacttcccagatctcaactctgtgctctgggcagctgaggagaagaaatgggtcccctacagggtcccaaacaataacttgccaatccctgaacgttacctgtccccagatgccacggtctccacagaagtccgggccattatttcctggatggagaagaacccctttgtgctgggtgcaaatctgaacggtggtgagcggcttgtgtcttatccctatgacatggcccggacacctagccaggagcagctgttggccgaggcactggcagctgcccgcggagaagatgatgacggggtgtctgaggcccaggagactccagatcacgctattttccgctggctggccatctcatttgcctccgcccatctcaccatgacggagccctaccggggagggtgccaggcccaggactacaccagcggcatgggcattgtcaacggggccaagtggaatcctcgctctgggactttcaatgactttagctacctgcacacaaactgtctggagctctccgtatacctgggctgtgacaagttcccccacgagagtgagctaccccgagaatgggagaacaacaaagaagcgctgctcaccttcatggagcaggtgcaccgtggcattaagggtgtggtgacagatgagcaaggcatccccattgccaatgccaccatctctgtgagtggcatcaaccatggtgtgaagacagcaagtggaggtgactactggcgcattctgaacccgggtgagtaccgtgtgacagctcacgcagagggctacacctcaagtgccaagatctgcaatgtggactacgatattggggccactcagtgcaacttcatcctggctcgatccaactggaagcgcattcgggagatcttggctatgaacgggaaccgtcccattctccgagttgacccctcacgacccatgaccccccagcagcggcgcatgcagcagcgccgtctacagtaccggctccgcatgagggaacagatgcgactgcgtcgcctcaattctaccgcaggccctgccacaagccccactcctgcccttatgcctcccccttcccctacaccagccattaccttgaggccctgggaagttctacccactaccactgcaggctgggaggagtcagagactgagacctatacagaagtagtgacagagtttgagacagagtatgggactgacctagaggtggaagagatagaggaggaggaggaggaggaggaggaagagatggacacaggccttacatttccactcacaacagtggagacctacacagtgaactttggggacttctgaga

SEQ ID NO: 54 - DNA, 1203 bp, Mus musculus
cgatcgatatgttgtcagaagccctgctggtgtccgccccggggaaggtcatcctccatggagaacacgctgtggtccatggcaaggtcgctctggcagcggccttgaacttgagaactttcctcctgctgcgaccgcagagcaatgggaaagtgagcgtcaatttacccaacatcggtattaagcaggtgtgggatgtgggcatgcttcagcgactggacacgagctttcttgagcaaggtgatgtctcggtacccaccttggagcaactggagaagctaaagaagatgggggacctccccagagaccgtgcaggcaatgaaggcatggctctgcttgcctttctctacctgtacctggcaatctgccggaagcagaggacactcccgagcctggacatggtggtgtggtcggaacttccccccggggcaggcttgggctccagcgccgcctactctgtgtgtctggcagccgccctcctgactgcctgtgaggaggtctccaacccgctcaaggacggggtctccgtcagcaggtggcccgaggaagatctgaagtcaatcaacaagtgggccttcgaaggggagagagtgatccatgggaacccttctggtgtggacaatgccgtcagcacctggggcggagccctgcgcttccagcaagggacgatgtcttccttgaagagcctcccgtctctgcagatcctgctcaccaacaccaaggtcccgcggagtaccaaggcccttgtggctgctgtcagaagcaggctgaccaagttccctgagattgtggccccgctgctgacctccattgacgcaatatccctggagtgtgagcacgtgctaggggagatggtggcagctccagttccggaacagtacctcgtactagaagagctgatagacatgaaccagcaccatctgaatgctctcggggtgggccacaactccctggaccagctctgccaagtaacggcagcacacggactgcacagcaagctgacgggcgctggcggtggcggctgtggcatcaccctcctgaagccaggtctagagcaagccacagtggaggcagccaagcaggccctgaccagctgcgggtttgactgctgggagaccagcatcggcgcacccggagtttccacacactcagctgcagctgtaggggaccctgtccgacaagccctgggcctcgcggccgctt

SEQ ID NO: 55 - DNA, 615 bp, Mus musculus
cgatcgatatgtcttcaggaaatgcaaaaattgggtatcctgctcccaacttcaaagctacagctgttatgccagatggacaattcaaagatatcagcctaagtgaatacaaaggaaaatatgttgtgttcttcttttaccctcttgactttacttttgtgtgtcccacggagatcattgctttcagtgatagagccgatgaatttaagaaactcaactgccaagtgattggcgcttctgtggattctcacttctgtcatctggcatggattaacacacccaagaaacaaggaggattgggacccatgaacattcccttaatatcagatcccaagcgcaccattgctcaggattatggagtcttaaaggctgatgaaggtatctctttcaggggcctttttattattgatgataaaggtatccttcgacagataacaataaacgatcttcccgttggccgctctgtggatgagattatacgactagtccaggccttccagttcactgacaaacatggtgaagtgtgtccagctggctggaaacctggcagtgataccatcaagcctgatgtcaataagagcaaagagtatttctctaagcagaaggcggccgctt

SEQ ID NO: 56 - DNA, 1761 bp, Mus musculus
cgatcgatatgttccttgtggggtcctccagccacaccctccatcggctccgcatactgccgttgctgttgcttctacagaccctggagaggggactgggccgtgccagcccggccggagcccccttggaagatgtggtcatcgagagataccacatccctcgggcctgtccccgagaagtgcagatgggggattttgtgcgttaccactacaatggcactttcgaagacgggaaaaagtttgactccagctatgaccgtagcaccctggtggccatcgttgtgggcgtaggccgcctcatcaccggcatggaccggggtctcatgggcatgtgtgtcaacgagcgccgccgcctcattgtgcctccccacctgggctacggcagcatcggtgtggcgggcctcatcccccctgatgccaccctctattttgacgtggtcctgctggacgtgtggaacaaagcagacacggtgcagtcaactatcctcctgcgccctccctactgcccccgaatggtgcagaacagtgactttgtgcgctatcactacaatggcactctgctggatggcactgcctttgacaacagctacagtaggggaggcacttatgacacctacatcggctctggttggctgatcaaaggcatggaccaggggctgctgggcatgtgccctggagagaaaaggaagatcattatccctcccttcctggcttatggggagaaaggctatgggactgtgatacccccgcaggcctccctggtcttctatgtcctgctgctggatgtccacaacccgaaggacacggtccagctggagacgctggagctgccccagggctgtgtccggcgagctgtggcgggggacttcatgcgttaccactacaatggctctttgatggatggtaccctctttgattccagctactcccgaaaccacacctacaatacctatgtcgggcagggttacatcatccctgggatggaccaggggctgcaaggcgcatgcataggggagcgaaggaggattactgtgccccctcaccttgcctacggggagaatgggacaggagacaagatccctggctcggctgtgctcatcttcgatgtgcacgtcgtcgacttccacaacccttcggaccctgtggaaatcaagacgctgtcccggcctcctgagaactgcaatgagacatccaaaatcggggacttcattcgctaccactacaactgttctctgctggacggcaccaggctcttctcgtcccacgactatgaggcccctcaagagatcaccctcggagccaacaaagtgatcgaaggtctggacaggggcctgcagggcatgtgtgtaggagagaggaggcagctcattgtgcccccacacctggcccacggggagaatggagcccggggtgtccctggcagtgctgtgctgctatttgaggtggagctggtatcccgagaggatggcctgcccacaggctacctgtttgtgtggtaccaggatccttccactagcctttttgaagacatggatctcaataaagatggagaggtgcccccagaagagttctcttccttcatcaaggctcaagtgaatgaaggcaaaggacgcctcatgcctgggcaagacccagacaaaaccatcagtgacatgtttcagaaccaggaccggaaccaggatggcaagatcacagctgaggagcccaagctgaagtcagatgaggaccaggagcgggtccatgaggagctcgcggccgctt

SEQ ID NO: 57 - DNA, 2678 bp, Mus musculus
catcgatatgagctcggacatggcagccgacgagtcggaggccccagtactctcggaggacgaggtatgggagttttgcctggataagacagaagatggtggcggatcccccggaagtgatgttacagacacttgtgagcctccatgtggatgctgggagttgaatccgaattccctggaagaggagcacgtgctgttcactgctgatccgtacctggagctccacaacgatgacacacgagttgtgagagtgaaggttatagctggcataggcctggccaagaaagacatcttgggagccagtgatccttacgtaagagtgacattgtatgacccgatgagtggaatccttaccagcgtgcagacaaaaactatcaaaaagtctttgaatccaaaatggaatgaagaaatactgttcagggtccttccacagcgacaccgcattcttttcgaagtgtttgatgaaaatcgtttgacaagagatgatttcctaggtcaagtggatgtccctctctatcctttaccgactgaaaacccaagaatggagagaccatatacatttaaggattttgttcttcatccaagaagtcacaaatcaagagttaaaggttatctgagattaaaaatgacttatttacctaaaaatggctcagaagatgaaaatgcagaccaggctgaggagttagagcctggctgggttgttttggaccaaccagatgctgccactcatttgccgcatccaccagaaccctctcccctacctccaggatgggaagagaggcaggatgtccttggaaggacctactacgtaaaccatgaatctagaagaacacagtggaaaaggccaagccctgacgatgacctcacggatgaagacaatgatgatatgcagctgcaagcgcagcgagcattcaccaccaggcggcagatatcggaggatgtggatggccctgacaaccgggagtcccctgagaattgggaaatcgtacgagaagatgaaaacaccgagtatagtggtcaggctgtccagtcacctccatcgggtcacattgatgtgcagactcaccttgcagaagagtttaataccagacttgccgtgtgtggaaatccagccaccagccagccggttaccagctcaaatcattccagcagaggaggcagcttgcagacctgtatctttgaggaacagcctacacttcctgtgcttttgcctacttcatctggattgccaccaggttgggaagaaaaacaagatgacagaggaagatcatactatgtagaccacaactctaaaaccaccacatggtccaagcccaccatgcaggatgatccaagatcgaaaatccctgctcatctgagaggaaagactgactccaatgacctgggacccttacctccaggctgggaagaaagaacccacacagatgggcgagtcttcttcataaaccacaatataaagaagacccagtgggaagatcctcgcctgcagaacgtggcaatcactggaccagcagtgccctactccagagattacaagagaaagtacgagttcttcagaaggaagctcaagaagcagactgacattccaaacaaatttgaaatgaagcttcgccgcgcaaacattctggaggattcttaccggaggattatgggtgtgaagagagctgacttgctcaaggccagactctggattgagtttgatggtgaaaagggccttgactatggaggggttgccagagagtggttcttcctcatctcgaaggaaatgttcaacccttactacggcctgtttgaatattctgctacggataattacaccctacagataaatcctaactcgggcttgtgtaatgaagatcacctctcatacttcaagttcattggccgtgtggctgggatggcagtttatcatggcaagctgttggatgggtttttcatccgtccgttttacaagatgatgcttcagaaactgataacactgcacgacatggagtccgtggatagtgaatattacagttctctgcgatggattcttgaaaatgacccgacggagctggacctgagatttatcatagatgaagaactttttggacagacacatcagcacgaactgaaaaccggaggatcagagattgttgtcaccaataagaacaaaaaggagtatatctaccttgtaatacaatggcgatttgtgaaccgtatccagaagcaaatggcagcttttaaagagggattttttgaactgataccacaggatctcatcaagatatttgatgaaaatgagctagagcttctcatgtgtggtctgggagatgtggatgtgaacgactggcgggaacacacaaaatacaaaaatggctacagcatgaaccaccaggtcatccactggttctggaaggctgtttggatgatggattcggaaaaaagaatacgcttacttcagtttgtcactggcacatcccgtgtgccgatgaatgggtttgctgaactctatggctcgaatggaccacaatccttcacagtggaacaatggggcacccctgataagctgccaagagcacacacctgcttcaatcgcctggacctgccaccctacgaatcctttgacgaactctgggataaacttcagatggcaattgagaacacacagggctttgatggcgttgatgcggccgctt

SEQ ID NO: 58 - DNA, 643 bp, Mus musculus
cggcacagcggcagccgagtatgatcgagctgctgcagacgcgccgggtcactcgagccagcaccaccgttctcacgccctgagctgcagacagctatgcggttttatctagtttgaaccaggctgctggagcttgctccctcccgccctctctcttttttcacggggctgtgtttttaatttggctgcaattgcatgaaatcccaatggtgtagaccagtggcgatggatctaggagtttaccaactgagacatttttccatttctttcttgtcgtctttgctgggaaccgaaaacgcttccgtgagacttgacaatagctctggtgcaagtgtggtagctatcgacaacaaaatagagcaagctatggatctggtgaaaagccatttgatgtatgcggtgagggaggaagtggaagttctgaaggagcagatcaaagaactaatagagaaaaactcccagctggagcaggagaacaatctgctgaagacgctggccagtccggagcagctcgcccagtttcaggcccagctgcagactggctcccctccggccaccacgcagccacaggggaccacacagccccctgcacagccagcatcccagggctcaggatcaaccgcatagcctcctagggatccgc

SEQ ID NO: 59 - DNA, 757 bp, Mus musculus
gctctagaatggacagcgcggccgccgccttcgccctagacccgccagcgcccggcccggggcccccgcccgcacccggcgattgcgcccaggcgcgcaagaacttctcggtgagccacctcctggacctggaggaggtggcggctgctgggcgcagggctgcggggcccgtttcggggcccgccgaggcgcgggagggagcggcgcgcgaaccgtccgggggcagcagcggcagcgaggcggcgccgcaggacggtgactgtcccagccccggccgtggcaccaaacgaaagaagaagcagcgccggaatcgaaccacattcaacagcagccagctgcaggcgctggagcgtgtatttgagcgcacacactaccctgacgcctttgtgcgtgaagagctagctcgccgtgtcaacctcagtgaggcacgtgtccaagtctggttccagaaccgccgtgccaagtttcgccggaatgaacgtgccatgctggctacccgctctgcctcgttgctcaagtcttatggccaggaggcggccattgaacagcctgtggccccccgacctaccacgatgagcccagattatctatcctggccagcatcctccccctacagctccgtgcctccctatagccccggaggttcaagtcctgcaactcctggagtcaacatggccaacagcatcgccagccttcgcctcaaggccaaagagttcagcctacaccacagccaggtgcccacagtgaacactagtcc

SEQ ID NO: 60 - DNA, 483 bp, Mus musculus
cgatcgatatgaaagtcgccagtggcagcaccgccaccgccgccgcgggccccagctgcgcgctgaaggccggcaagacagcgagcggtgcgggcgaggtggtgcgctgtctgtctgagcagagcgtggccatctcgcgctgcgccgggggcgccggggcgcgcctgcctgccctgctggacgagcagcaggtaaacgtgctgctctacgacatgaacggctgttactcacgcctcaaggagctggtgcccaccctgccccagaaccgcaaggtgagcaaggtggagattctccagcacgtcatcgactacatcagggaccttcagttggagctgaactcggaatccgaagttgggacccccgggggccgagggctgccggtccgggctccgctcagcaccctcaacggcgagatcagcgccctgacggccgaggcggcatgcgttcctgcggacgatcgcatcttgtgtcgcgcggccgctt

SEQ ID NO: 61 - DNA, 420 bp, Mus musculus
cgatcgatatgaaagccttcagtcccgtgaggtccgttaggaaaaacagcctgtcggaccacagcctgggcatctcccggagcaaaacccctgtggacgacccgatgagcctgctatacaacatgaacgactgctactccaagctcaaggagctggtgcccagcatcccccagaacaagaaggtgagcaagatggaaatcctgcagcacgtcatcgactacatcttggacctgcagatcgccctggactcgcatcccactattgtcagcctgcatcaccagagacccgggcagaaccaggcgtccaggacgccgctgaccaccctcaacacggatatcagcatcctgtccttgcaggcttctgaattcccttctgagttaatgtcaaatgacagcaaagcactgtgtggcgcggccgctt

SEQ ID NO: 62 - DNA, 420 bp, Mus musculus; identical to SEQ ID NO: 61

SEQ ID NO: 63 - DNA, 1404 bp, Mus musculus
cggaattcgccatgtcaacagcaggagttgctgctcaggatattcgagtcccattaaaaactggatttctccataatggtcaggccttggggaatatgaagtcctgctggggcagtcacagtgagtttgaaaataactttttaaatattgatccaataaccatggcctacaatctgaactcccctgctcaggagcacctaacaactgttggatgtgctgctcggtctgctccagggagcggccacttctttgcagagtgtggtccatctccaaggtcaagcttgccccctcttgttatctcaccaagtgaaagctcgggacagcgtgaagaggatcaagttatgtgtggttttaagaaactctcagtgaatggggtctgcacttccacacctccacttacacccattaaaagctgcccttcccctttcccctgtgcggctctgtgtgatcggggttctcggccgctcccgccactgcccatctctgaagacctatgtgtggatgaggccgacagtgaggtagagcttctaaccaccagctcagacacagacttgcttttagaagactctgcgccttcagatttcaaatacgatgctcctggcaggcgcagcttccgtgggtgcggccagatcaactatgcatattttgacagcccaactgtttctgtggcagatcttagctgtgcatctgaccagaacagagttgttccagacccaaaccctcccccacctcaaagccatcgcagattaaggaggtctcactcaggaccagctgggtcatttaacaagccagccattcggatatctagctgcacacacagagcttctcctagctctgatgaagacaagcctgaggtccctcccagggttcctatacctcctaggccagcaaagccagactatagacggtggtcagcagaagtgacctccaacacctacagtgatgaagataggcctcccaaagtccccccgagagaacctttgtctcggagtaactcccgtaccccaagtcctaaaagccttccgtcttacctcaatggggtcatgcccccaacacagagcttcgctcctgaccccaagtatgtcagcagcaaagccctgcagagacagagcagcgaaggatctgccaacaaggttccttgcatcctgcccattattgaaaatgggaagaaggttagctcaacgcattattacttactacctgagaggccaccgtacctggacaaatatgaaaagtattttaaggaagcagaagaaacaaacccaagcacccaaattcagccattacctgctgcctgtggtatggcctctgccacagaaaagctggcctccagaatgaaaatagatatgggtagccacgggaagcgcaaacacttatcctacgtggtttctccagcggccgctt

SEQ ID NO: 64 - DNA, 1821 bp, Mus musculus
cgatcgatatgccctgtattcaagctcaatatggaacaccagcaacgagcccaggaccgcgtgaccacctgaccggtgatcccctggcccttgagttcggcaagcctaccatggacctggccagccccgagacagcacctgccgcacctgctacactgcccagcttcagcaccttcatggacgggtacaccggagagtttgacaccttcctctaccagctgccggggacgacccagccgtgctcctcagcttgttcctctgcctcctccacgtcttcttcctcatcctcggccacctcccccgcttcggcgtccttcaagtttgaggacttccaggtgtacggctgctacccgggcaccctgagcggcccattagatgagaccctatcctccagcggctctgagtactatggcagtccctgctcagccccctcgccatctacacccaacttccagccgtcccagctttctccctgggacggctcatttggccacttctccccgagccagacttatgaaggcctctgggcatggacagagcagttgcctaaggcttcttcagggcctccgccacctccaaccttcttctccttcagtcctcccactggccccagccccagcctggcccagagttctctgaaattgttcccaccaccagccacccaccagcttggggagggggagagctattccatgccagcagctttccccggcttggcacccacctctccgaaccgtgacacttccggcattctggacgcacccgtgacctccaccaagtcccggagcggggcttcaggtggcagcgagggccgctgtgcagtctgtggtgacaatgcttcgtgtcagcactatggggtccgcacctgtgagggctgcaagggcttcttcaagcgcacagtacagaaaagcgccaagtacatctgcctggcaaacaaggattgccctgtggacaagaggcggcggaaccgctgccagttctgccgcttccagaagtgcctggctgtgggcatggtgaaggaagttgtacggacagacagcctaaaagggcggcggggccggctaccttcaaaacccaagcagcctccagatgcctcccctaccaatcttctcacttccctcatccgggcacacttggactccgggcctagcactgccaaattggactattccaagttccaggaactggtgctgccccgcttcgggaaggaagatgccggtgacgtgcaacaattttatgacttgctctctggttccctggacgttatccgaaagtgggcagaaaaaatccctggcttcattgagctttgcccaggagaccaagacctgttgctagagtctgccttcctggaactcttcatcctccgcctggcataccgatctaaacccggtgaggggaagctcatcttctgctcaggcctggtactacaccagctgcagtgtgcccgtggctttggtgattggattgacaacatcctggccttctcacggtccctgcacagcttgggtgttgatgttcccgcctttgcctgcctgtccgctctggtcctcatcactgatcgacacgggctccaggaccctcgtcgggtggaagagctgcagaatcgcattgctagctgtctgaaggagcacatggctaccgtggcaggagacccacagccggccagctgcctgtcacgtctgctgggcaaactgcctgagcttcggaccctgtgcactcaaggcctgcagcgcatcttttgcctcaagttggaggacttggtaccccctccacctattgtggacaagatctttatggacacattgtctttcgcggccgctt

SEQ ID NO: 65 - DNA, 979 bp, Mus musculus
aatctagaatggaggccagagctcagagtggcaacgggtcgcagcctttgctgcagacagcccatgacagtggcaggcagcgcggggagccggatccaagagatgcccttacccagcaggtacacgtcttgtctctggatcagatcagagccatccgaaacaccaatgagtacacagagggccctactgtggtcccaagacctgggctcaagcctgctcctcgcccctccactcagcacaaacatgaaagactccacggtctgccggagcaccgccagcctcccaggctccagccctcgcaggtccattcttcacgggcccctctgtccaggtccatcagcactgtcagctcagggtctcggagcagtacaaggacaagtaccagcagcagctcctcggaacagagactgttaggaccgtccttctcccacgggcctgctgctgctgatggaataatccgagtgcagcctaaatcggagctcaagccaggtgacgttaagccactgagcaaggatgatttgggtctgcatgcctacaggtgtgaggactgcggcaagtgcaagtgtaaggagtgcacctacccgaggcccctgccgtcggactggatctgtgacaagcagtgcctctgctcagcccagaacgtcattgactatgggacttgtgtgtgctgtgtgaaaggtctcttctatcactgctccaatgacgatgaggacaattgtgctgacaacccgtgctcttgcagccagtcccattgttgtacgcgatggtcagcgatgggagtcatgtctctctttttgccttgtttatggtgttaccttccagccaagggttgccttaaattgtgccaggggtgttatgaccgagtgaacaggccgggttgtcgttgtaaaaactcaaatacagtttgctgcaaagttcccactgtcccccctaggaactttgaaaaaccaacaactagtaaaagggcgaattccagcac

SEQ ID NO: 66 - DNA, 1355 bp, Mus musculus
cattctagaatgagcaccgagggcgggcctccgccacccccgccgcgcccgccgcctgccccactccgccgcgcgtgcagcccggcgcccggcgcgctccaggccgccttgatgagcccgccacccgccgccaccctggagtccacttcgtcgtcgtcatcatcatcctctgcctcctgtgcctcgtcctcttctaactccgtcagcgcctcggccggtgcttgcaagagtgcggctagcagcggcggcgcgggcgccgggagtggaggcaccaagaaggcaacctcggggctgcggcggccggagaagcctccttactcgtacatcgcgctcatcgtcatggccatccagagctcgcccagcaagcgcctgacgctcagtgagatctaccagttcctacaggcgcgcttcccctttttccgtggcgcctaccagggctggaagaactccgtgcgccacaacctctcgctcaacgagtgcttcatcaagctgcccaagggcctcgggagacctggtaagggccactactggaccatcgacccggccagcgaattcatgtttgaggagggttcgttccgccgccggccgcgcggcttcaggcggaagtgccaggctctcaaacccatgtaccatcgcgtggtgagcggcttgggcttcggggcctcgctgctgccccagggcttcgacttccaagcgcccccgtcggcgcctctgggttgccacggtcaaggcggttatggtggcctcgacatgatgcccgcgggctatgatacaggggcgggtgctccgggccacgcgcatccacaccacctccaccaccaccacgtcccccacatgtcgcccaacccgggctccacctatatggccagctgcccggtgcccgcaggtcctgcgggcgtcggtgcggcagcgggtggcggcggtggcggcggggactatgggccggacagcagcagcagccctgtgccctcatccccggctatggcaagcgccattgagtgtcactcgccctacactagccctgcggcacattggagctcgcctggcgcttcaccttacctcaagcagccgcctgccctgacgccaagcagtaatcccgcggcctctgctggtctgcaccccagcatgtcttcctactcgttggagcagagctacttgcaccagaacgcccgcgaggatctctcagtcggactgccccgttaccagcaccactccactccagtgtgcgacaggaaagatttcgtcctcaatttcaatggcatttcttctttccacccttccgctagtggctcttattatcaccatcatcaccagagcgtgtgccaagatattaagccctgtgttatgactagtat

SEQ ID NO: 67 - DNA, 1063 bp, Mus musculus
aatctagaatggcgttgactgcggatgtggcaggaccagcaccttggggcttccgaattagcgggggcagagatttccacacacccatcattgtgaccaaggtcacagagcggggcaaggctgaagcagctgatctccggcctggcgacatcattgtggccatcaatggacagagtgcagagaacatgctacacgcggaggcccaaagcaagatccgacagagcgcctcacccctaagactgcagctggaccggtcccaaacagcctctcctgggcagaccaatggggagggctccttggaagtgctggcaaccagattccagggctccctgaggacacaccgtgacagccagtcttcccagaggtctgcctgcttcagcccagtctctctcagccccaggccttgcagccccttctccaccccaccccctaccagcccagttgccctttctaaagaggatatgattggctgtagtttccagagtctgacacactctccaggccttgctgctgctcaccacttgacctaccctggccaccccaccagccaacaggccggccacagcagcccaagcgactccgcagtgagggtgctgctccattccccaggacggccctccagccctaggttcagcagtttggatctggaggaagactcagaggtgttcaagatgctgcaggagaaccgccagggacgggccgccccaaggcagtccagctcttttcgactcttacaggaagccttggaggctgaggagagaggtggcacacctgcctttgtgcccagctcgctgagctcccaggcttccttgcccacctccagggccttggccactccacccaagctccacacctgtgagaaatgcagcgtcaacatctcgaaccaggcggtccgcatccaggaggggaggtaccgacaccctggctgctacacttgcgcagactgtgggctgaacctgaagatgcgcggccacttctgggtgggcaatgagttgtactgcgagaagcatgcccgccagcgctactctatgcctggaactctcaactctcgagccactagtaa

SEQ ID NO: 68 - DNA, 693 bp, Mus musculus
cgatcgatatggtcacccacagcaagtttcccgccgccgggatgagccgccccctggacaccagcctgcgcctcaagaccttcagctccaaaagcgagtaccagctggtggtgaacgccgtgcgcaagctgcaggagagcggattctactggagcgccgtgaccggcggcgaggcgaacctgctgctcagcgccgagcccgcgggcacctttcttatccgcgacagctcggaccagcgccacttcttcacgttgagcgtcaagacccagtcggggaccaagaacctacgcatccagtgtgaggggggcagcttttcgctgcagagtgacccccgaagcacgcagccagttccccgcttcgactgtgtactcaagctggtgcaccactacatgccgcctccagggaccccctccttttctttgccacccacggaaccctcgtccgaagttccggagcagccacctgcccaggcactccccgggagtacccccaagagagcttactacatctattctgggggcgagaagattccgctggtactgagccgacctctctcctccaacgtggccaccctccagcatctttgtcggaagactgtcaacggccacctggactcctatgagaaagtgacccagctgcctggacccattcgggagttcctggatcagtatgatgctccacttgcggccgctt

SEQ ID NO: 69 - DNA, 2343 bp, Mus musculus
cgatcgatatggctcagaaaccggacggcggtgcaggcctccgcggcttccaggctgaggcctctgttgaagacagcgccttgcttgtgcagaccttgatggaagccatccagatctccgaggctccgcccaccagccaggccacagcagctgccagtgggccaaatgctagtccccagagttcacagcccccaactgccaatgagaaggctgatactgaggtttcagcagctgctgccaggcctaagacaggctttaaggcccagaatgccaccacaaaggggccaaatgattactctcaggcacgtaatgccaaggagatgcccaagaaccagtctaaggcggcctttaagtcacagaatggcacccctaaaggtccacatgctgcctctgacttttcccaggcagcacccacaggcaaatcagctaaaaagtctgaaatggcctttaagggtcagaatagcactaaggctggccccggtaccacctacaatttccctcagtctcccagtgccaatgagatgaccaacaaccagcctaagacagctaaggcttggaatgacactactaaggtccctggagctgatgcccagacccagaatgtaaatcaggccaaaatggctgacgtagggaccagcgcaggtatctctggagctgatggtgcagcagcccagacatcagcagatggctcccagactcagaacgtggagtcccggactataattcggggcaagaggacccgcaaggttaataacttgaatgtggaagagaacaacagtggggatcaaaggcgtgcctcactggcctcagggaactggaggtctgctccggttccagtgaccactcagcagaacccacctggagcaccccctaatgtggtgtggcagacaccactggcttggcagaacccatcaggctggcaaaaccagacagccaggcagaccccaccagcagcacgtcagagtcccccagctaggcagacaccatcagcttggcagaacccagttgcatggcagaatccagtgatctggcctaacccagtgatctggcagaatccagtgatctggccaaaccccattgtctggcctggcccaattgtctggccaaacccaatggcctggcagagtacacctggatggcagagcccacccagctggcaggctccacctagttggcagagccctcaagattggcagggccctccagattggcaggtaccacctgactggtcaatgtctcctgactggtcctttccctccgactggccttttccacctgactggatccccgccgactggccaattccacctgactggcagaacttacgaccctcacctaatctgagatcctcctccaactctcgtgcctcacagaaccagggtcctccacagccccgagatgtggcccttcttcaggaaagagcaaataagttggtcaagtacctgatgcttaaagactacacgaaggtgcccatcaagcgctcagaaatgctgagggatatcatccgagaatacactgatgtctatccagaaatcattgagcgcgcatgctttgtcctggagaagaaatttggaatccagctgaaggaaatcgacaaagaagagcatctgtatattctcatcagtacccctgagtccctggctggcatactgggaacgaccaaagacacaccgaagcttggcctcctcttagtgattctgggcattatcttcatgaatggcaaccgtgccaccgaggccgtcctctgggaagcactgcgcaagatgggactacgtcctggggtgagacatcccctccttggtgacctgagaaaacttcttacttacgagtttgtaaagcagaaatacctggactatagacgagtgcccaacagcaaccctcctgagtatgagttcctctggggcctccgctcctaccatgagactagcaagatgaaagtgctgagattcattgcagaggttcagaagagagaccctcgtgactggactgcacagttcatggaagctgcagatgaagccttggatgctctggatgctgctgcagctgaggcagaggcccgggctgaagcaagaaaccgcatgggaattggagatgaggctgtgtctggtccctggagctgggatgacattgagtttgagctgctgacctgggatgaggaaggagattttggagatccttggtccaggatcccctttaccttctgggccagataccaccagaatgcccgctccaggtttccccaggcctttactggccccatcattggccccagtggtactgccaccgccaacttcgccgccaacttcggtgccattggcttcttctgggttgaggcggccgctt

SEQ ID NO: 70 - DNA, 693 bp, Mus musculus; identical to SEQ ID NO: 68

SEQ ID NO: 71 - DNA, 1360 bp, Mus musculus
gcacgaggggatcctgccagccgcgaccccagccttcgccgtcgccgcctagggcgccccaggccgcaccatggtgaaggtgacgttcaactcggcgctggcccagaaggaggccaagaaggacgagcccaagagcagcgaggaggcgctcatcgtccctccggatgccgtggcggtggattgcaaggacccgggtgacgtggttccggttggacagaggagagcgtggtgttggtgcatgtgtttcggactggccttcatgcttgctggcgtcatcctcggaggggcgtacctgtacaagtattttgctcttcagccagatgatgtgtactactgtggactaaagtacatcaaagatgacgtcatcctgaacgagccttctgcggatgccccagctgctcgctaccagacaattgaagagaacattaagatctttgaggaagacgcagtggaattcatcagtgtgcctgtaccagagtttgcggacagcgatcctgccaacattgtgcacgacttcatcaagaaaaaacgtggggaggaattcaatgccacagcataccctacccctttgtattttgtgcagtgattgttttttaaaatcttcttttcatgtaagtagcaaacagggcttcactgtctcttcatctcaataactcaattaaaaaccattatcttaaaaaaagaaaacaaaacctttcttttttctaagtgtggtgtctttgatgtttgaattagcaaatgtgcaggttcctagataagattcgcttctccttagagcttacctactaggaagaatctaaattgcttggaaatcactaatctggatttttgtgttaattctgcacttccatgagggaaagatgcctaaagaatagtcattcgcatatgttaaagggaccacagtgacttgcttgtagatgctagccctgctacctagtctgttagcatttgaagtcaccttctcatactactttaattaaaatgtgccgtatcttcaatgttgctttaactactttagaggatttcagccttgatgttttaatatcctaggcctctgctgtaataagattttagacaaatgtttggaatttaagaagcaactcatgttactaatttgtatagcccatatctgtggaatggaatataaatatcacaaagccatgtgatgagactgtgcgttgtttttcccataggataaaaccaaagaagtaatttggttcttcatactttaaggtaatccacatacataaaaaatgaaattattttataaagtctagttctctacatgcagttataaaaatcagctttttaaaaaaataaaataagccattaattactaaaaaaaaaaaaaaaaaaaaaa

SEQ ID NO: 72 - DNA, 693 bp, Mus musculus; identical to SEQ ID NO: 68

SEQ ID NO: 73 - DNA, 311 bp, Mus musculus
catcgatatggcgtcgctcctgtgctgtgggcctaagctggccgcctgtggcatcgtcctcagcgcctggggagtgatcatgttgataatgctcgggatatttttcaatgtccattctgctgtgttaattgaggacgttcccttcacagagaaagattttgagaacggtcctcagaacatatacaacctgtacgagcaagtcagctacaactgtttcatcgccgcgggcctctacctcctcctcggaggcttctccttctgccaagttcgtctcaacaagcgcaaggaatacatggtgcgcgcggccgctt

SEQ ID NO: 74 - DNA, 311 bp, Mus musculus
catcgatatggcagcagagactctgactgaactggaggcggccattgagactgtggtctctactttcttcacctttgcagggcgggaaggacgcaaaggcagcctgaacatcaatgaatttaaggaactggccactcagcaactgcctcatttgctcaaggacgtgggctctctagatgaaaagatgaagaccttggatgtgaatcaggactcagagctgaggttcagtgaatactggagactgattggggagctggcaaaggaagtcaggaaggagaaggccctggggatccggaagaaggcggccgctt

SEQ ID NO: 75 - DNA, 228 bp, Mus musculus
cgatcgatatgtctgaaaagaagcagccggtcgacttgggtctcttggaagaggacgacgagttcgaggagtttcccgcggaagactgggctggcttagatgaagatgaagatgcacatgtctgggaggataattgggatgatgacaatgtagaagatgacttctctaaccagttacgtgctgagctggagaagcacggctacaagatggagacatcagcggccgctt

SEQ ID NO: 76 - DNA, 1843 bp, Homo sapiens
gcgagatccctaccgcagtagccgcctctgccgccgcggagcttcccgaacctctcagccgcccggagccgctcccggagcccggccgtagaggctgcaatcgcagccgggagcccgcagcccgcgccccgagcccgccgccgcccttcgagggcgccccaggccgcgccatggtgaaggtgacgttcaactccgctctggcccagaaggaggccaagaaggacgagcccaagagcggcgaggaggcgctcatcatcccccccgacgccgtcgcggtggactgcaaggacccagatgatgtggtaccagttggccaaagaagagcctggtgttggtgcatgtgctttggactagcatttatgcttgcaggtgttattctaggaggagcatacttgtacaaatattttgcacttcaaccagatgacgtgtactactgtggaataaagtacatcaaagatgatgtcatcttaaatgagccctctgcagatgccccagctgctctctaccagacaattgaagaaaatattaaaatctttgaagaagaagaagttgaatttatcagtgtgcctgtcccagagtttgcagatagtgatcctgccaacattgttcatgactttaacaagaaacttacagcctatttagatcttaacctggataagtgctatgtgatccctctgaacacttccattgttatgccacccagaaacctactggagttacttattaacatcaaggctggaacctatttgcctcagtcctatctgattcatgagcacatggttattactgatcgcattgaaaacattgatcacctgggtttctttatttatcgactgtgtcatgacaaggaaacttacaaactgcaacgcagagaaactattaaaggtattcagaaacgtgaagccagcaattgtttcgcaattcggcattttgaaaacaaatttgccgtggaaactttaatttgttcttgaacagtcaagaaaaacattattgaggaaaattaatatcacagcataaccccaccctttacattttgtgcagtgattattttttaaagtcttctttcatgtaagtagcaaacagggctttactatcttttcatctcattaattcaattaaaaccattaccttaaaatttttttctttcgaagtgtggtgtcttttatatttgaattagtaactgtatgaagtcatagataatagtacatgtcaccttaggtagtaggaagaattacaatttctttaaatcatttatctggatttttatgttttattagcattttcaagaagacggattatctagagaataatcatatatatgcatacgtaaaaatggaccacagtgacttatttgtagttgttagttgccctgctacctagtttgttagtgcatttgagcacacattttaattttcctctaattaaaatgtgcagtattttcagtgtcaaatatatttaactatttagagaatgatttccacctttatgttttaatatcctaggcatctgctgtaataatattttagaaaatgtttggaatttaagaaataacttgtgttactaatttgtataacccatatctgtgcaatggaatataaatatcacaaagttgtttaactagactgcgtgttgtttttcccgtataataaaaccaaagaatagtttggttcttcaaatcttaagagaatccacataaaagaagaaactattttttaaaaattcacttctatatatacaatgagtaaaatcacagattttttctttaaataaaaataagtcattttaataactaaaccagattctttgtggatactattaaagtaacatttaagcctcaaccttg

SEQ ID NO: 77 - DNA, 2538 bp, Homo sapiens
cggagctcccacctccgcttacagctcgctgccgccgtcctgccccgcgcccccaggagacctggaccagaccacgatgtggaaacgctggctcgcgctcgcgctcgcgctggtggcggtcgcctgggtccgcgccgaggaagagctaaggagcaaatccaagatctgtgccaatgtgttttgtggagccggccgggaatgtgcagtcacagagaaaggggaacccacctgtctctgcattgagcaatgcaaacctcacaagaggcctgtgtgtggcagtaatggcaagacctacctcaaccactgtgaactgcatcgagatgcctgcctcactggatccaaaatccaggttgattacgatggacactgcaaagagaagaaatccgtaagtccatctgccagcccagttgtttgctatcagtccaaccgtgatgagctccgacgtcgcatcatccagtggctggaagctgagatcattccagatggctggttctctaaaggcagcaactacagtgaaatcctagacaagtattttaagaactttgataatggtgattctcgcctggactccagtgaattcctgaagtttgtggaacagaatgaaactgccatcaatattacaacgtatccagaccaggagaacaacaagttgcttaggggactctgtgttgatgctctcattgaactgtctgatgaaaatgctgattggaaactcagcttccaagagtttctcaagtgcctcaacccatctttcaaccctcctgagaagaagtgtgccctggaggatgaaacgtatgcagatggagctgagaccgaggtggactgtaaccgctgtgtctgtgcctgtggaaattgggtctgtacagccatgacctgtgacggaaagaatcagaagggggcccagacccagacagaggaggagatgaccagatatgtccaggagctccaaaagcatcaggaaacagctgaaaagaccaagagagtgagcaccaaagagatctaatgaggaggcacagaccagtgtctggatcccagcatcttctccacttcagcgctgagttcagtatacacaagtgtctgctacagtcgccaaatcaccagtatttgcttatatagcaatgagttttattttgtttatttgttttgcaataaaggatatgaaggtggctggctaggaagggaagggccacagccttcatttctaggagtgctttaagagaaactgtaaatggtgctctggggctggaggctagtaaggaaactgcatcacgattgaaagaggaacagacccaaatctgaacctcttttgagtttactgcatctgtcagcaggctgcagggagtgcacacgatgccagagagaacttagcagggtgtccccggaggagaggtttgggaagctccacggagaggaacgctctctgcttccagcctctttccattgccgtcagcatgacagacctccagcatccacgcatctcttggtcccaataactgcctctagatacatagccatactgctagttaacccagtgtccctcagacttggatggagtttctgggagggtacacccaaatgatgcagatacttgtatactttgagccccttagcgacctaaccaaattttaaaaatactttttaccaaaggtgctatttctctgtaaaacactttttttttggcaagttgactttattcttcaattattatcattatattattgttttttaatattttattttcttgactaggctgactttatcatgacaactctagctgattctttatgaaggattagggatattcatcttcagcagtgcacatgagaaataaactctgaaaaaggcaatttctggggtttaggaaggaccgtattctgggaattacttcagaggaacggacaataattctaggattatagccaagaaggactggaagacttcaggagatgcttcagcttcttctagattttgaatgctgaataagccactgaagtgtgatatctatattatccttttctttgcaagaaattgaatagcagcaaatttctctatcctgaatagcagacagattcattttttcaattagctgtttctcatccaaggcattaggaagacctccctttttccaaggcacatcgaacctgagttagcaggaagggattctccaataagagcagaaatgccaggaaatcctcaacactatggaagatttcttaccggacccttgaacctcaatgatccagatgcaaaatgcagattccccaaaatttttgtaaatacagatgacacttatgaagagctccatttaatcgtttataaggccatgagtgcggctgtgtgctttatgatcgacgcctctgtccacccaacgttggatttttgccgaagactggacagcatcgttggcccccagctcacagtgctgccctctgacatctgtgaacagtttaacatcaacaagaggatgtccgggtctgagaaagaaccccagtttaagtttatctacttcaaccacatgaatctcgccgagaagagcac

SEQ ID NO: 78 - DNA, 1173 bp, Homo sapiens
cggcacgagcacagtgctccggatcctccaatcttcgctcctccaatctccgctcctccacccagttcaggaacccgcgaccgctcgcagcgctctcttgaccactatgagcctcctgtccagccgcgcggcccgtgtccccggtccttcgagctccttgtgcgcgctgttggtgctgctgctgctgctgacgcagccagggcccatcgccagcgctggtcctgccgctgctgtgttgagagagctgcgttgcgtttgtttacagaccacgcagggagttcatcccaaaatgatcagtaatctgcaagtgttcgccataggcccacagtgctccaaggtggaagtggtagcctccctgaagaacgggaaggaaatttgtcttgatccagaagccccttttctaaagaaagtcatccagaaaattttggacggtggaaacaaggaaaactgattaagagaaatgagcacgcatggaaaagtttcccagtctacagcagagaagttttctggaggtctctgaacccagggaagacaagaaggaaagattttgttgttgtttgtttatttggtttccccagtagttagctttcttccctggattcctcacttttgaagagtgtgaggaaaacctatgtttggcgcttaagctttcagctcagcttaatgaagtgtttagcatagtacctctgctatttgctgttattttatctgctatgctattgaagttttggcaattgactatagtgtgagccaggaatcactggctgttaatcttacaaagtgtcttggaattgtaggtgactattatttttccaagaaatatcccttaagatattaactgagaaggctgggggtttaatgtggaaatgatgtttcaaaaggaatcctgtgatggaaatacaactggtatcttcacttttttaggaattgggaaatattttaatgtttcttggggaatatgttagagaattcccttactcttgattgtgggatactatttaattatttcactttagaaagctgagtgtttcacaccttatctatgtagaatatatttccttattcagaatttctaaaagtttaagttctatgagggctaatatcttatcttcctataattttagacattgctttaactttttagtaaaaaaaaaaaaaaaaaaaaaaaaaaaa

SEQ ID NO: 79 - DNA, 808 bp, Homo sapiens
cggattccggatgcgtttcctggcagctacattcctgctcctggcgctcagcaccgctgcccaggccgaaccggtgcagttcaaggactgcggttctgtggatggagttataaaggaagtgaatgtgagcccatgccccacccaaccctgccagctgagcaaaggacagtcttacagcgtcaatgtcaccttcaccagcaatattcagtctaaaagcagcaaggccgtggtgcatggcatcctgatgggcgtcccagttccctttcccattcctgagcctgatggttgtaagagtggaattaactgccctatccaaaaagacaagacctatagctacctgaataaactaccagtgaaaagcgaatatccctctataaaactggtggtggagtggcaacttcaggatgacaaaaaccaaagtctcttctgctgggaaatcccagtacagatcgtttctcatctctaagtgcctcattgagttcggtgcatctggccaatgagtctgctgagactcttgacagcacctccagctctgctgcttcaacaacagtgacttgctctccaatggtatccagtgattcgttgaagaggaggtgctctgtagcagaaactgagctccgggtggctggttctcagtggttgtctcatgtctctttttctgtcttaggtggtttcattaaatgcagcacttggttagcagatgtttaatttttttttttaacaacattaacttgtggcctctttctacacctggaaatttactcttgaataaataaaaactcgtttgtcttgtaaaaaaaaaaaaaaa

SEQ ID NO: 80 - DNA, 882 bp, Homo sapiens
  modified_base (615): a, c, g, t, other or unknown
gaattcgttcagcctggttaagtccaagctggctcattctgctcccccgggtcggagccccccggagctgcgcgcgggcttgcagcgcctcgcccgcgctgtcctcccggtgtcccgcttctccgcgccccagccgccggctgccagcttttcggggccccgagtcgcacccagcgaagagagcgggcccgggacaagctcgaactccggccgcctcgcccttaaccagctccgtccctctaccccctaggggtcgcgcccacgatgctgcagggccctggctcgctgctgctgctcttcctcgcctcgcactgctgcctgggctcggcgcgcgggctcttcctctttggccagcccgacttctcctacaagcgcagcaattgcaagcccatcccggccaacctgcagctgtgccacggcatcgaataccagaacatgcggctgcccaacctgctgggccacgagaccatgaaggaggtgctggagcaggccggcgcttggatcccgctggtcatgaagcagtgccacccggacaccaagaagttcctgtgctcgctcttcgcccccgtctgcctcgatgacctagacgagaccatccagccatgccactctcgntgcgtgcaggtgaaggatcgctgcgccccggtcatgtccgccttcccctggcccgacatgcttgagtgcgaccgtttcccccaggacaacgacctttgcatccccctcgctagcagcgaccacctcctgccagccaccgaggaagctccaaaggtatgtgaagcctgcaaaaataaaaatgatgatgacaacgacataatggaaacgctttgtaaaaatgattttgcactgaaaataaaagtgaaggagataacctacatcaaccgt

SEQ ID NO: 81 - DNA, 1199 bp, Homo sapiens
ccaacttcggctatgacctgtaccgggtgcgatccagcatgagccccacgaccaacgtgctcctgtctcctctcagtgtggccacggccctctcggccctctcgctgggagcggagcagcgaacagaatccatcattcaccgggctctctactatgacttgatcagcagcccagacatccatggtacctataaggagctccttgacacggtcactgccccccagaagaacctcaagagtgcctcccggatcgtctttgagaagaagctgcgcataaaatccagctttgtggcacctctggaaaagtcatatgggaccaggcccagagtcctgacgggcaaccctcgcttggacctgcaagagatcaacaactgggtgcaggcgcagatgaaagggaagctcgccaggtccacaaaggaaattcccgatgagatcagcattctccttctcggtgtggcgcacttcaaggggcagtgggtaacaaagtttgactccagaaagacttccctcgaggatttctacttggatgaagagaggaccgtgagggtccccatgatgtcggaccctaaggctgttttacgctatggcttggattcagatctcagctgcaagattgcccaactgcccttgaccggaagcatgagtatcatcttcttcctgcccctgaaagtgacccagaatttgaccttgatagaggagagcctcacctccgagttcattcatgacatagaccgagaactgaagaccgtgcaggcggtcctcactgtccccaagctgaagctgagttacgaaggcgaagtcaccaagtccctgcaggagatgaagctgcaatccttgtttgattcaccagactttagcaagatcacaggcaaacccatcaagctgactcaggtggaacaccgggctggctttgagtggaacgaggatggggcgggaaccacccccagcccagggctgcagcctgcccacctcaccttcccgctggactatcaccttaaccagcctttcatcttcgtactgagggacacagacacaggggcccttctcttcattggcaagattctggaccccaggggcccctaatatcccagtttaatattccaataccctagaagaaaacccgagggacagcagattccacaggacacgaaggctgcccctgtaaggtttcaatgcatacaataaaagagctttatccct

SEQ ID NO: 82 - DNA, 594 bp, Homo sapiens
gtcactcctgccttcaccatgaagtccagcggcctcttccccttcctggtgctgcttgccctgggaactctggcaccttgggctgtggaaggctctggaaagtccttcaaagctggagtctgtcctcctaagaaatctgcccagtgccttagatacaagaaacctgagtgccagagtgactggcagtgtccagggaagaagagatgttgtcctgacacttgtggcatcaaatgcctggatcctgttgacaccccaaacccaacaaggaggaagcctgggaagtgcccagtgacttatggccaatgtttgatgcttaacccccccaatttctgtgagatggatggccagtgcaagcgtgacttgaagtgttgcatgggcatgtgtgggaaatcctgcgtttcccctgtgaaagcttgattcctgccatatggaggaggctctggagtcctgctctgtgtggtccaggtcctttccaccctgagacttggctccaccactgatatcctcctttggggaaaggcttggcacacagcaggctttcaagaagtgccagttgatcaatgaataaataaacgagcctatttctctttgcac

SEQ ID NO: 83 - DNA, 688 bp, Homo sapiens
ggctcagctgccgggctgctccggttggaaacgccaagccagctgccgtcctaatccaaaagccatgaacagcggcgtgtgcctgtgcgtgctgatggcggtactggcggctggcgccctgacgcagccggtgcctcccgcagatcccgcgggctccgggctgcagcgggcagaggaggcgccccgtaggcagctgagggtatcgcagagaacggatggcgagtcccgagcgcacctgggcgccctgctggcaagatacatccagcaggcccggaaagctccttctggacgaatgtccatcgttaagaacctgcagaacctggaccccagccacaggataagtgaccgggactacatgggctggatggattttggccgtcgcagtgccgaggagtatgagtacccctcctagaggacccagccgccatcagcccaacggaagcaacctcccaacccagaggaggcagaataagacaacaatcacactcataactcattgtctgtggagtttgacattgaatgtatctatttattaagttctcaatgtgaaaattgtgtctgtaagattgtccagtgcaaccacacacgctcaccagaagttgtgcaaactgaagacaaaactgttttcttcatctgtgactcctgttctgaaaatgttgttatgctattaaagtgatttcattctgcc

SEQ ID NO: 84 - DNA, 1837 bp, Homo sapiens
acaaccgtaacagccaccagacaagcttcagtggccgggccttcacatccagacttgcctgagaggacccacctctgagtgtccagtggtcagttgccccaggatggggaccacagccagagcagccttggtcttgacctatttggctgttgcttctgctgcctctgagggaggcttcacggctacaggacagaggcagctgaggccagagcactttcaagaagttggctacgcagctcccccctccccacccctatcccgaagcctccccatggatcaccctgactcctctcagcatggccctccctttgagggacagagtcaagtgcagccccctccctctcaggaggccacccctctccaacaggaaaagctgctacctgcccaactccctgctgaaaaggaagtgggtccccctctccctcaggaagctgtccccctccaaaaagagctgccctctctccagcaccccaatgaacagaaggaaggaacgccagctccatttggggaccagagccatccagaacctgagtcctggaatgcagcccagcactgccaacaggaccggtcccaagggggctggggccaccggctcgatggcttcccccctgggcggccttctccagacaatctgaaccaaatctgccttcctaaccgtcagcatgtggtatatggtccctggaacctaccacagtccagctactcccacctcactcgccagggtgagaccctcaatttcctggagattggatattcccgctgctgccactgccgcagccacacaaaccgcctagagtgtgccaaacttgtgtgggaggaagcaatgagccgattctgtgaggccgagttctcggtcaagacccgaccccactggtgctgcacgcggcagggggaggctcggttctcctgcttccaggaggaagctccccagccacactaccagctccgggcctgccccagccatcagcctgatatttcctcgggtcttgagctgcctttccctcctggggtgcccacattggacaatatcaagaacatctgccacctgaggcgcttccgctctgtgccacgcaacctgccagctactgaccccctacaaagggagctgctggcactgatccagctggagagggagttccagcgctgctgccgccaggggaacaatcacacctgtacatggaaggcctgggaggatacccttgacaaatactgtgaccgggagtatgctgtgaagacccaccaccacttgtgttgccgccaccctcccagccctactcgggatgagtgctttgcccgtcgggctccttaccccaactatgaccgggacatcttgaccattgacatcagtcgagtcacccccaacctcatgggccacctctgtggaaaccaaagagttctcaccaagcataaacatattcctgggctgatccacaacatgactgcccgctgctgtgacctgccatttccagaacaggcctgctgtgcagaggaggagaaattaaccttcatcaatgatctgtgtggtccccgacgtaacatctggcgagaccctgccctctgctgttacctgagtcctggggatgaacaggtcaactgcttcaacatcaattatctgaggaacgtggctctagtgtctggagacactgagaacgccaagggccagggggagcagggctcaactggaggaacaaatatcagctccacctctgagcccaaggaagaatgagtcaccccagagccctagagggtcagatggggggaaccccaccctgccccacccatctgaacactcattacactaaacacctcttggatttggaaaaaaaaaaaaaaaaaa

SEQ ID NO: 85 - DNA, 2902 bp, Homo sapiens
cacagccatggctgtgagaagggactccgtgtggaagtactgctggggtgttttgatggttttatgcagaactgcgatttccaaatcgatagttttagagcctatctattggaattcctcgaactccaaatttctacctggacaaggactggtactatacccacagataggagacaaattggatattatttgccccaaagtggactctaaaactgttggccagtatgaatattataaagtttatatggttgataaagaccaagcagacagatgcactattaagaaggaaaatacccctctcctcaactgtgccaaaccagaccaagatatcaaattcaccatcaagtttcaagaattcagccctaacctctggggtctagaatttcagaagaacaaagattattacattatatctacatcaaatgggtctttggagggcctggataaccaggagggaggggtgtgccagacaagagccatgaagatcctcatgaaagttggacaagatgcaagttctgctggatcaaccaggaataaagatccaacaagacgtccagaactagaagctggtacaaatggaagaagttcgacaacaagtccctttgtaaaaccaaatccaggttctagcacagacggcaacagcgccggacattcggggaacaacatcctcggttccgaagtggccttatttgcagggattgcttcaggatgcatcatcttcatcgtcatcatcatcacgctggtggtcctcttgctgaagtaccggaggagacacaggaagcactcgccgcagcacacgaccacgctgtcgctcagcacactggccacacccaagcgcagcggcaacaacaacggctcagagcccagtgacattatcatcccgctaaggactgcggacagcgtcttctgccctcactacgagaaggtcagcggggactacgggcacccggtgtacatcgtccaggagatgcccccgcagagcccggcgaacatttactacaaggtctgagagggaccctggtggtacctgtgctttcccagaggacacctaatgtcccgatgcctcccttgagggtttgagagcccgcgtgctggagaattgactgaagcacagcaccgggggagagggacactcctcctcggaagagcccgtcgcgctggacagcttacctagtcttgtagcattcggccttggtgaacacacacgctccctggaagctggaagactgtgcagaagacgcccattcggactgctgtgccgcgtcccacgtctcctcctcgaagccatgtgctgcggtcactcaggcctctgcagaagccaagggaagacagtggtttgtggacgagagggctgtgagcatcctggcaggtgccccaggatgccacgcctggaagggccggcttctgcctggggtgcatttcccccgcagtgcataccggacttgtcacacggacctcgggctagttaaggtgtgcaaagatctctagagtttagtccttactgtctcactcgttctgttacccagggctctgcagcacctcacctgagacctccactccacatctgcatcactcatggaacactcatgtctggagtcccctcctccagccgctggcaacaacagcttcagtccatgggtaatccgttcatagaaattgtgtttgctaacaaggtgccctttagccagatgctaggctgtctgcgaagaaggctaggagttcatagaagggagtggggctggggaaagggctggctgcaattgcagctcactgctgctgcctctgaaacagaaagttggaaaggaaaaaagaaaaaagcaattaggtagcacagcactttggttttgctgagatcgaagaggccagtaggagacacgacagcacacacagtggattccagtgcatggggaggcactcgctgttatcaaatagcgatgtgcaggaagaaaagcccctcttcattccggggaacaaagacgggtattgttgggaaaggaacaggcttggagggaagggagaaagtaggccgctgatgatatattcgggcaggactgttgtggtactggcaataagatacacagctccgagctgtaggagagtcggtctgctttggatgattttttaagcagactcagctgctatacttatcacattttattaaacacagggaaagcatttaggagaatagcagagagccaaatctgacctaaaagttgaaaagccaaaggtcaaacaggctgtaattccatcatcatcgttgttattaaagaatccttatctataaaaggtaggtcagatccccctccccccaggttcctccttcccctcccgattgagccttacgacactttggtttatgcggtgctgtccgggtgccagggctgcagggtcggtactgatggagcctgcagcgcccggtgctctgtgtcaaggtgaagcacatacggcagacctcttagagtccttaagacggaagtaaattatgatgtccagggggagaaggaagataggacgtatttataataggtatatagaacacaagggatataaaatgaaagatttttactaatatatattttaaggttgcacacagtacacaccagaagatgtgaaattcatttgtggcaattaagtggtcccaatgctcagcgcttaaaaaaacaaattggacagctacttctgggaaaaacaacatcattccaaaaagaacaataatgagagcaaatgcaaaaataaccaagtcctccgaaggcatctcacggaaccgtagactaggaagtacgagccccacagagcaggaagccgatgtgactgcatcatatatttaacaatgacaagatgttccggcgtttatttctgcgttgggttttcccttgccttatgggctgaagtgttctctaga

SEQ ID NO: 86 - DNA, 2863 bp, Homo sapiens
cggaattcaagaaacacaaaatgcagtgggcgtccctcctgctgctggcagggctcttctccctctcccaggcccagtatgaagatgaccctcattggtggttccactacctccgcagccagcagtccacctactacgatccctatgacccttacccgtatgagacctacgagccttacccctatggggtggatgaagggccagcctacacctacggctctccatcccctccagatccccgcgactgcccccaggaatgcgactgcccacccaacttcctcacggccatgtactgtgacaatcgcaacctcaagtacctgcccttcgttccctcccgcatgaagtatgtgtacttccagaacaaccagatcacctccatccaggaaggcgtctttgacaatgccacagggctgctctggattgctctccacggcaaccagatcaccagtgataaggtgggcaggaaggtcttctccaagctgaggcacctggagaggctgtacctggaccacaacaacctgacccggatgcccggtcccctgcctcgatccctgagagagctccatctcgaccacaaccagatctcacgggtccccaacaatgctctggaggggctggagaacctcacggccttgtacctccaacacgatgagatccaggaagtgggcagttccatgaggggcctccggtcactgatcttgctggacctgagttataaccaccttcggaaggtgcctgatgggctgccctcagctcttgagcagctgtacatggagcacaacaatgtctacaccgtccccgatagctacttccggggggcgcccaagctgctgtatgtgcggctgtcccacaacagtctaaccaacaatggcctggcctccaacaccttcaattccagcagcctccttgagctagacctctcctacaaccagctgcagaagatccccccagtcaacaccaacctggagaacctctacctccaaggcaataggatcaatgagttctccatcagcagcttctgcaccgtggtggacgtcgtgaacttctccaagctgcaggtcgtgcgcctggacgggaacgagatcaagcgcagcgccatgcctgccgacgcgcccctctgcctgcgccttgccagcctcatcgagatctgagcagccctggcaccgggtactgggcggagagcccccgtggcatttggcttgatggtttggtttggcttatggaagatctgggacagaccgtgtgacagaagtccacgggcaccctctgtagtcttctttcctgtaggtggggttagggggggcgatcagggacaggcagccttctgctgaggacataggcagaagctcactcttttccagggacagaagtggtggtagatggaaggatccctggatgttccaaccccataaatctcacggctcttaagttcttcccaatgatctgaggtcatggaacttcaaaagtggcatgggcaatagtatataaccatacttttctaacaatccctggctgtctgtgagcagcacttgacagctctccctctgtgctgggctggtcgtgcagttactctgggctcccatttgttgcttctcaaaatatacctcttgcccagctgcctcttctgaaatccacttcacccactccactttcctccacagatgcctcttctgtgccttaagcagagtcaggagaccccaaggcatgtgagcatctgcccagcaacctgtggagacaacccacactgtgtctgagggtgaaaggacaccaggagtcacttctatacctccctaacctcacccctggaaagccaccagattggaggtcaccagcatgatgataatattcatgacctgatgtgggaggagacagccaacctcaggcttagatcaatgtatagggctatattttggcagctgggtagctctttgaaggtggataagacttcagaagaggaaaggccagactttgcttaccatcagcatctgcaatgggccaaacacacctcaaattggctgagttgagaaagcagccccagtagttccattcttgcccagcactttctgcattccaaacagcatcctacctgggtttttatccacaaaggtagcggccacatggtttttaaagtatgagaaacacagtttgtcctctccttttatccaagcaggaagattctatatcctgatggtagagacagactccaggcagccctggacttgctagcccaaagaaggaggatgtggttaatctgtttcacctggtttgtcctaaggccatagttaaaaagtaccagctctggctggggtccgtgaagcccaggccaggcagccaaatcttgcctgtgctgggcatacaaccctctgctttcacatctctgagctatatcctcattagtgaaggtggcttttgctttatagtttggctggggagcacttaattcttcccatttcaaaaggtaatgttgcctggggcttaacccacctgccctttgggcaaggttgggacaaagccatctgggcagtcaggggcaaggactgttggaggagagttagcccaagtataggctctgcccagatgccatcacatccctgatactgtgtatgctttgaagcaccttccctgagaagggaagaggggatctttggactacgttcttggctccagacctggaatccacaaaagccaaaccagctcatttcaacaaaggagctccgatgtgaggggcaaggctgccccctgccccagggctcttcagaaagcatctgcatgtgaacaccatcatgcctttataaaggatccttattacaggaaaagcatgagtggtggctaacctgaccaataaagttattttatgattgcc

SEQ ID NO: 87 - DNA, 2263 bp, Homo sapiens
gcacgagaagaatttaggaatttctgattcatttaaaggatttacaaattcatcaacccctgaaaactaaagcaaattgaacaggaaaaaaaaaaagaagatgggttttttaagtccaatatatgttattttcttcttttttggagtcaaagtacattgccaatatgaaacttatcagtgggatgaagactatgaccaagagccagatgatgattaccaaacaggattcccatttcgtcaaaatgtagactacggagttccttttcatcagtatactttaggctgtgtcagtgaatgcttctgtccaactaactttccatcatcaatgtactgtgataatcgcaaactcaagactatcccaaatattccgatgcacattcagcaactctaccttcagttcaatgaaattgaggctgtgactgcaaattcattcatcaatgcaactcatcttaaagaaattaacctcagccacaacaaaattaaatctcaaaagattgattatggtgtgtttgctaagcttccaaatctactacaacttcatctagagcataataatttagaagaatttccatttcctcttcctaaatctctggaaagactccttcttggttacaatgaaatctccaaactgcagacaaatgctatggatgggctagtaaacttgaccatgcttgatctctgttataattatcttcatgattctctgctaaaagacaaaatctttgccaaaatggaaaaactaatgcagctcaacctctgcagtaacagattagaatcaatgcctcctggtttgccttcttcacttatgtatctgtctttagaaaataattcaatttcttctatacccgaaaaatacttcgacaaacttccaaaacttcatactctaagaatgtcacacaacaaactacaagacatcccatataatatttttaatcttcccaacattgtagaactcagtgttggacacaacaaattgaagcaagcattctatattccaagaaatttggaacacctatacctacaaaataatgaaatagaaaagatgaatcttacagtgatgtgtccttctattgacccactacattaccaccatttaacatacattcgtgtggaccaaaataaactaaaagaaccaataagctcatacatcttcttctgcttccctcatatacacactatttattatggtgaacaacgaagcactaatggtcaaacaatacaactaaagacacaagttttcaggagatttccagatgatgatgatgaaagtgaagatcacgatgatcctgacaatgctcatgagagcccagaacaagaaggagcagaagggcactttgaccttcattattatgaaaatcaagaatagcaagaaactatataggtatacacttacgacttcacaaaacctatacttaatatagtaaatctaagtaaacatgtattactcaaagtaatatatttagaattatgtattagtataagatcagaattgaatttaagttgttggtgacatctgcatcatttcataggattagaacttactcaaaataatgtaaatctttaaaaatataaattagaatgacaagtgggaatcataaattaaacgttaatggtttcttatgctctttttaaatatagaaatatcatgttaaagaaagtgagtgtatcatttctattaacagtaatttttctaaaaatgaggaaggaagtagcattagcagtaaagacccacaggccacgaccctcctgatcactctgaggacaatatttaaatgacaggaaggtatattaatgtaacaagcattcatttaaggaatagaccattttctctgacctcttcttcaggaaagctttcacactggtatttgtgatctcaccattatgacatccatccccctagctcaccacatagcacatagaatgatatttttgatttgtaagaggccatccaggtactaaggacccaaggcatacagattcacaaaattaactaatctttttgcctcagaataccaaaacaacaaaattataaagctgttatttggacaactaaaaaacaccaaactatctcattgcaatttgtattttagcagatttcagcaactatcctaaacaatgttattgtgttccattttaactgggataaatgtttttgtaaaaatacaaccatagaaaggcctctttgttacaaaatgatttgcaaagaaataactgctttgtttgcaagattaaattagtgttggcaaaataaagttctaaagat

SEQ ID NO: 88 - DNA, 2376 bp, Homo sapiens
cgcgcggcccctgtcctccggcccgagatgaatcctgcggcagaagccgagttcaacatcctcctggccaccgactcctacaaggttactcactataaacaatatccacccaacacaagcaaagtttattcctactttgaatgccgtgaaaagaagacagaaaactccaaattaaggaaggtgaaatatgaggaaacagtattttatgggttgcagtacattcttaataagtacttaaaaggtaaagtagtaaccaaagagaaaatccaggaagccaaagatgtctacaaagaacatttccaagatgatgtctttaatgaaaagggatggaactacattcttgagaagtatgatgggcatcttccaatagaaataaaagctgttcctgagggctttgtcattcccagaggaaatgttctcttcacggtggaaaacacagatccagagtgttactggcttacaaattggattgagactattcttgttcagtcctggtatccaatcacagtggccacaaattctagagagcagaagaaaatattggccaaatatttgttagaaacttctggtaacttagatggtctggaatacaagttacatgattttggctacagaggagtctcttcccaagagactgctggcataggagcatctgctcacttggttaacttcaaaggaacagatacagtagcaggacttgctctaattaaaaaatattatggaacgaaagatcctgttccaggctattctgttccagcagcagaacacagtaccataacagcttgggggaaagaccatgaaaaagatgcttttgaacatattgtaacacagttttcatcagtgcctgtatctgtggtcagcgatagctatgacatttataatgcgtgtgagaaaatatggggtgaagatctaagacatttaatagtatcgagaagtacacaggcaccactaataatcagacctgattctggaaaccctcttgacactgtgttaaaggttttggagattttaggtaagaagtttcctgttactgagaactcaaagggttacaagttgctgccaccttatcttagagttattcaaggggatggagtagatattaataccttacaagagattgtagaaggcatgaaacaaaaaatgtggagtattgaaaatattgccttcggttctggtggaggtttgctacagaagttgacaagagatctcttgaattgttccttcaagtgtagctatgttgtaactaatggccttgggattaacgtcttcaaggacccagttgctgatcccaacaaaaggtccaaaaagggccgattatctttacataggacgccagcagggaattttgttacactggaggaaggaaaaggagaccttgaggaatatggtcaggatcttctccatactgtcttcaagaatggcaaggtgacaaaaagctattcatttgatgaaataagaaaaaatgcacagctgaatattgaactggaagcagcacatcattaggctttatgactgggtgtgtgttgtgtgtatgtaatacataatgtttattgtacagatgtgtggggtttgtgttttatgatacattacagccaaattatttgttggtttatggacatactgccctttcattttttttcttttccagtgtttaggtgatctcaaattaggaaatgcatttaaccatgtaaaagatgagtgctaaagtaagctttttagggccctttgccaataggtagtcattcaatctggtattgatcttttcacaaataacagaactgagaaacttttatatataactgatgatcacataaaacagatttgcataaaattaccatgattgctttatgtttatatttaacttgtatttttgtacaaacaagattgtgtaagatatatttgaagtttcagtgatttaacagtctttccaacttttcatgatttttatgagcacagactttcaagaaaatacttgaaaataaattacattgccttttgtccattaatcagcaaataaaacatggccttaacaaagttgtttgtgttattgtacaatttgaaaattatgtcgggacataccctatagaattactaaccttactgccccttgtagaatatgtattaatcattctacattaaagaaaataatggttcttactggaatgtctaggcactgtacagttattatatatcttggttgttgtattgtaccagtgaaatgccaaatttgaaaggcctgtactgcaattttatatgtcagagattgcctgtggctctaatatgcacctcaagattttaaggagataatgtttttagagagaatttctgcttccactatagaatatatacataaatgtaaaatacttacaaaagtgg

SEQ ID NO: 89 - DNA, 5041 bp, Homo sapiens; identical to SEQ ID NO: 14

SEQ ID NO: 90 - DNA, 5041 bp, Homo sapiens; identical to SEQ ID NO: 14

SEQ ID NO: 91 - DNA, 2312 bp, Homo sapiens
tccagtgacggagccgcccggccgacagccccgagacgacagcccggcgcgtcccggtccccacctccgaccaccgccagcgctccaggccccgcgctccccgctcgccgccaccgcgccctccgctccgcccgcagtgccaaccatgaccgccgccagtatgggccccgtccgcgtcgccttcgtggtcctcctcgccctctgcagccggccggccgtcggccagaactgcagcgggccgtgccggtgcccggacgagccggcgccgcgctgcccggcgggcgtgagcctcgtgctggacggctgcggctgctgccgcgtctgcgccaagcagctgggcgagctgtgcaccgagcgcgacccctgcgacccgcacaagggcctcttctgtgacttcggctccccggccaaccgcaagatcggcgtgtgcaccgccaaagatggtgctccctgcatcttcggtggtacggtgtaccgcagcggagagtccttccagagcagctgcaagtaccagtgcacgtgcctggacggggcggtgggctgcatgcccctgtgcagcatggacgttcgtctgcccagccctgactgccccttcccgaggagggtcaagctgcccgggaaatgctgcgaggagtgggtgtgtgacgagcccaaggaccaaaccgtggttgggcctgccctcgcggcttaccgactggaagacacgtttggcccagacccaactatgattagagccaactgcctggtccagaccacagagtggagcgcctgttccaagacctgtgggatgggcatctccacccgggttaccaatgacaacgcctcctgcaggctagagaagcagagccgcctgtgcatggtcaggccttgcgaagctgacctggaagagaacattaagaagggcaaaaagtgcatccgtactcccaaaatctccaagcctatcaagtttgagctttctggctgcaccagcatgaagacataccgagctaaattctgtggagtatgtaccgacggccgatgctgcaccccccacagaaccaccaccctgccggtggagttcaagtgccctgacggcgaggtcatgaagaagaacatgatgttcatcaagacctgtgcctgccattacaactgtcccggagacaatgacatctttgaatcgctgtactacaggaagatgtacggagacatggcatgaagccagagagtgagagacattaactcattagactggaacttgaactgattcacatctcatttttccgtaaaaatgatttcagtagcacaagttatttaaatctgtttttctaactgggggaaaagattcccacccaattcaaaacattgtgccatgtcaaacaaatagtctatcttccccagacactggtttgaagaatgttaagacttgacagtggaactacattagtacacagcaccagaatgtatattaaggtgtggctttaggagcagtgggagggtaccagcagaaaggttagtatcatcagatagctcttatacgagtaatatgcctgctatttgaagtgtaattgagaaggaaaattttagcgtgctcactgacctgcctgtagccccagtgacagctaggatgtgcattctccagccatcaagagactgagtcaagttgttccttaagtcagaacagcagactcagctctgacattctgattcgaatgacactgttcaggaatcggaatcctgtcgattagactggacagcttgtggcaagtgaatttcctgtaacaagccagattttttaaaatttatattgtaaatattgtgtgtgtgtgtgtgtgtgtatatatatatatatatgtacagttatctaagttaatttaaagttgtttgtgcctttttatttttgtttttaatgctttgatatttcaatgttagcctcaatttctgaacaccataggtagaatgtaaagcttgtctgatcgttcaaagcatgaaatggatacttatatggaaattctctcagatagaatgacagtccgtcaaaacagattgtttgcaaaggggaggcatcagtgtccttggcaggctgatttctaggtaggaaatgtggtagctcacgctcacttttaatgaacaaatggcctttattaaaaactgagtgactctatatagctgatcagttttttcacctggaagcatttgtttctactttgatatgactgtttttcggacagtttatttgttgagagtgtgaccaaaagttacatgtttgcacctttctagttgaaaataaagtatattttttctaaaaaaaaaaaaaaacgacagcaacggaattc

SEQ ID NO: 92 - DNA, 1124 bp, Homo sapiens
gccgctgccaccgcaccccgccatggagcggccgtcgctgcgcgccctgctcctcggcgccgctgggctgctgctcctgctcctgcccctctcctcttcctcctcttcggacacctgcggcccctgcgagccggcctcctgcccgcccctgcccccgctgggctgcctgctgggcgagacccgcgacgcgtgcggctgctgccctatgtgcgcccgcggcgagggcgagccgtgcgggggtggcggcgccggcagggggtactgcgcgccgggcatggagtgcgtgaagagccgcaagaggcggaagggtaaagccggggcagcagccggcggtccgggtgtaagcggcgtgtgcgtgtgcaagagccgctacccggtgtgcggcagcgacggcaccacctacccgagcggctgccagctgcgcgccgccagccagagggccgagagccgcggggagaaggccatcacccaggtcagcaagggcacctgcgagcaaggtccttccatagtgacgccccccaaggacatctggaatgtcactggtgcccaggtgtacttgagctgtgaggtcatcggaatcccgacacctgtcctcatctggaacaaggtaaaaaggggtcactatggagttcaaaggacagaactcctgcctggtgaccgggacaacctggccattcagacccggggtggcccagaaaagcatgaagtaactggctgggtgctggtatctcctctaagtaaggaagatgctggagaatatgagtgccatgcatccaattcccaaggacaggcttcagcatcagcaaaaattacagtggttgatgccttacatgaaataccagtgaaaaaaggtgaaggtgccgagctataaacctccagaatattattagtctgcatggttaaaagtagtcatggataactacattacctgttcttgcctaataagtttcttttaatccaatccactaacactttagttatattcactggttttacacagagaaatacaaaataaagatcacacatcaagactatctacaaaaatttattatatatttacagaagaaaagcatgcatatcattaaacaaataaaatactttttatcacaaaaaaaaaaaaaaaa

SEQ ID NO: 93 - DNA, 782 bp, Homo sapiens
aggggccttagcgtgccgcatcgccgagatccagcgcccagagagacaccagagaacccaccatggccccctttgagcccctggcttctggcatcctgttgttgctgtggctgatagcccccagcagggcctgcacctgtgtcccaccccacccacagacggccttctgcaattccgacctcgtcatcagggccaagttcgtggggacaccagaagtcaaccagaccaccttataccagcgttatgagatcaagatgaccaagatgtataaagggttccaagccttaggggatgccgctgacatccggttcgtctacacccccgccatggagagtgtctgcggatacttccacaggtcccacaaccgcagcgaggagtttctcattgctggaaaactgcaggatggactcttgcacatcactacctgcagtttcgtggctccctggaacagcctgagcttagctcagcgccggggcttcaccaagacctacactgttggctgtgaggaatgcacagtgtttccctgtttatccatcccctgcaaactgcagagtggcactcattgcttgtggacggaccagctcctccaaggctctgaaaagggcttccagtcccgtcaccttgcctgcctgcctcgggagccagggctgtgcacctggcagtccctgcggtcccagatagcctgaatcctgcccggagtggaactgaagcctgcacagtgtccaccctgttcccactcccatctttcttccggacaatgaaataaagagttaccacccagc

SEQ ID NO: 94 - DNA, 1995 bp, Homo sapiens
gagagttttgtcccacagtcagcaggccactagtttattaacttccagtcaccttgatttttgctaaaatgaagactctgcagtctacacttctcctgttactgcttgtgcctctgataaagccagcaccaccaacccagcaggactcacgcattatctatgattatggaacagataattttgaagaatccatatttagccaagattatgaggataaatacctggatggaaaaaatattaaggaaaaagaaactgtgataatacccaatgagaaaagtcttcaattacaaaaagatgaggcaataacaccattacctcccaagaaagaaaatgatgaaatgcccacgtgtctgctgtgtgtttgtttaagtggctctgtatactgtgaagaagttgacattgatgctgtaccacccttaccaaaggaatcagcctatctttacgcacgattcaacaaaattaaaaagctgactgccaaagattttgcagacatacctaacttaagaagactcgattttacaggaaatttgatagaagatatagaagatggtactttttcaaaactttctctgttagaagaactttcacttgctgaaaatcaactactaaaacttccagttcttcctcccaagctcactttatttaatgcaaaatacaacaaaatcaagagtaggggaatcaaagcaaatgcattcaaaaaactgaataacctcaccttcctctacttggaccataatgccctggaatccgtgcctcttaatttaccagaaagtctacgtgtaattcatcttcagttcaacaacatagcttcaattacagatgacacattctgcaaggctaatgacaccagttacatccgggaccgcattgaagagatacgcctggagggcaatccaatcgtcctgggaaagcatccaaacagttttatttgcttaaaaagattaccgatagggtcatacttttaacctctattggtacaacatataaatgaaagtacacctacactaatagtctgtctcaacaatgagtaaaggaacttaagtattggtttaatattaaccttgtatctcattttgaaggaatttaatattttaagcaaggatgttcaaaatcttacatataataagtaaaaagtaagactgaatgtctacgttcgaaacaaagtaatatgaaaatatttaaacagcattacaaaatcctagtttatactagactaccatttaaaaatcatgtttttatataaatgcccaaatttgagatgcattattcctattactaatgatgtaagtacgaggataaatccaagaaactttcaactctttgcctttcctggcctttactggatcccaaaagcatttaaggtacatgttccaaaaactttgaaaagctaaatgtttcccatgatcgctcattcttcttttatgattcatacgttattccttataaagtaagaactttgttttcctcctatcaaggcagctattttattaaatttttcacttagtctgagaaatagcagatagtctcatatttaggaaaactttccaaataaaataaatgttattctctgataaagagctaatacagaaatgttcaagttattttactttctggtaatgtcttcagtaaaatattttctttatctaaatattaacattctaagtctaccaaaaaaagttttaaactcaagcaggccaaaaccaatatgcttataagaaataatgaaaagttcatccatttctgataaagttctctatggcaaagtctttcaaatacgagataactgcaaaatattttccttttatactacagaaatgagaatctcatcaataaattagttcaagcataagatgaaaacagaatattctgtggtgccagtgcacactaccttcccacccatacacatccatgttcactgtaacaaactgaatattcacaataaagcttctgagtaacactttctgattactcatgataaaaaaaaaaaaaaaaagg

SEQ ID NO: 95 - DNA, 1191 bp, Homo sapiens
atgaactggcatctccccctcttcctcttggcctctgtgacgctgccttccatctgctcccacttcaatcctctgtctctcgaggaactaggctccaacacggggatccaggttttcaatcagattgtgaagtcgaggcctcatgacaacatcgtgatctctccccatgggattgcgtcggtcctggggatgcttcagctgggggcggacggcaggaccaagaagcagctcgccatggtgatgagatacggcgtaaatggagttggtaaaatattaaagaagatcaacaaggccatcgtctccaagaagaataaagacattgtgacagtggctaacgccgtgtttgttaagaatgcctctgaaattgaagtgccttttgttacaaggaacaaagatgtgttccagtgtgaggtccggaatgtgaactttgaggatccagcctctgcctgtgattccatcaatgcatgggttaaaaacgaaaccagggatatgattgacaatctgctgtccccagatcttattgatggtgtgctcaccagactggtcctcgtcaacgcagtgtatttcaagggtctgtggaaatcacggttccaacccgagaacacaaagaaacgcactttcgtggcagccgacgggaaatcctatcaagtgccaatgctggcccagctctccgtgttccggtgtgggtcgacaagtgcccccaatgatttatggtacaacttcattgaactgccctaccacggggaaagcatcagcatgctgattgcactgccgactgagagctccactccgctgtctgccatcatcccacacatcagcaccaagaccatagacagctggatgagcatcatggtccccaagagggtgcaggtgatcctgcccaagttcacagctgtagcacaaacagatttgaaggagccgctgaaagttcttggcattactgacatgtttgattcatcaaaggcaaattttgcaaaaataacaaggtcagaaaacctccatgtttctcatatcttgcaaaaagcaaaaattgaagtcagtgaagatggaaccaaagcttcagcagcaacaactgcaattctcattgcaagatcatcgcctccctggtttatagtagacagaccttttctgtttttcatccgacataatcctacaggtgctgtgttattcatggggcagataaacaaaccc

SEQ ID NO: 96 - DNA, 739 bp, Homo sapiens
ctaacccagaaacatccaattctcaaactgaagctcgcactctcgcctccagcatgaaagtctctgccgcccttctgtgcctgctgctcatagcagccaccttcattccccaagggctcgctcagccagatgcaatcaatgccccagtcacctgctgttataacttcaccaataggaagatctcagtgcagaggctcgcgagctatagaagaatcaccagcagcaagtgtcccaaagaagctgtgatcttcaagaccattgtggccaaggagatctgtgctgaccccaagcagaagtgggttcaggattccatggaccacctggacaagcaaacccaaactccgaagacttgaacactcactccacaacccaagaatctgcagctaacttattttcccctagctttccccagacaccctgttttattttattataatgaattttgtttgttgatgtgaaacattatgccttaagtaatgttaattcttatttaagttattgatgttttaagtttatctttcatggtactagtgttttttagatacagagacttggggaaattgcttttcctcttgaaccacagttctacccctgggatgttttgagggtctttgcaagaatcattaatacaaagaattttttttaacattccaatgcattgctaaaatattattgtggaaatgaatattttgtaactattacaccaaataaatatatttttgtacaaaaaaaaaaaaaa

SEQ ID NO: 97 - DNA, 2178 bp, Homo sapiens
gtagtctgagcgctacccggttgctgctgcccaaggaccgcggagtcggacgcaggcagaccatgtggaccctggtgagctgggtggccttaacagcagggctggtggctggaacgcggtgcccagatggtcagttctgccctgtggcctgctgcctggaccccggaggagccagctacagctgctgccgtccccttctggacaaatggcccacaacactgagcaggcatctgggtggcccctgccaggttgatgcccactgctctgccggccactcctgcatctttaccgtctcagggacttccagttgctgccccttcccagaggccgtggcatgcggggatggccatcactgctgcccacggggcttccactgcagtgcagacgggcgatcctgcttccaaagatcaggtaacaactccgtgggtgccatccagtgccctgatagtcagttcgaatgcccggacttctccacgtgctgtgttatggtcgatggctcctgggggtgctgccccatgccccaggcttcctgctgtgaagacagggtgcactgctgtccgcacggtgccttctgcgacctggttcacacccgctgcatcacacccacgggcacccaccccctggcaaagaagctccctgcccagaggactaacagggcagtggccttgtccagctcggtcatgtgtccggacgcacggtcccggtgccctgatggttctacctgctgtgagctgcccagtgggaagtatggctgctgcccaatgcccaacgccacctgctgctccgatcacctgcactgctgcccccaagacactgtgtgtgacctgatccagagtaagtgcctctccaaggagaacgctaccacggacctcctcactaagctgcctgcgcacacagtgggggatgtgaaatgtgacatggaggtgagctgcccagatggctatacctgctgccgtctacagtcgggggcctggggctgctgcccttttacccaggctgtgtgctgtgaggaccacatacactgctgtcccgcggggtttacgtgtgacacgcagaagggtacctgtgaacaggggccccaccaggtgccctggatggagaaggccccagctcacctcagcctgccagacccacaagccttgaagagagatgtcccctgtgataatgtcagcagctgtccctcctccgatacctgctgccaactcacgtctggggagtggggctgctgtccaatcccagaggctgtctgctgctcggaccaccagcactgctgcccccagggctacacgtgtgtagctgaggggcagtgtcagcgaggaagcgagatcgtggctggactggagaagatgcctgcccgccgggcttccttatcccaccccagagacatcggctgtgaccagcacaccagctgcccggtggggcagacctgctgcccgagcctgggtgggagctgggcctgctgccagttgccccatgctgtgtgctgcgaggatcgccagcactgctgcccggctggctacacctgcaacgtgaaggctcgatcctgcgagaaggaagtggtctctgcccagcctgccaccttcctggcccgtagccctcacgtgggtgtgaaggacgtggagtgtggggaaggacacttctgccatgataaccagacctgctgccgagacaaccgacagggctgggcctgctgtccctaccgccagggcgtctgttgtgctgatcggcgccactgctgtcctgctggcttccgctgcgcagccaggggtaccaagtgtttgcgcagggaggccccgcgctgggacgcccctttgagggacccagccttgagacagctgctgtgagggacagtactgaagactctgcagccctcgggaccccactcggagggtgccctctgctcaggcctccctagcacctccccctaaccaaattctccctggaccccattctgagctccccatcaccatgggaggtggggcctcaatctaaggccttccctgtcagaagggggttgtggcaaaagccacattacaagctgccatcccctccccgtttcagtggaccctgtggccaggtgcttttccctatccacaggggtgtttgtgtgtgtgcgcgtgtgcgtttcaataaagtttgtacactttcaaaaaaaaaaaaaaaaaaaaaaaaaaaaaa

SEQ ID NO: 98 - DNA, 3430 bp, Homo sapiens
  modified_base (3332): a, c, g, t, other or unknown
tgcagcgcctcctcttagtgactccgggagcttcggctgtagccggctctgcgcgcccttccaacgaataatagaaattgttaattttaacaatccagagcaggccaacgaggctttgctctcccgacccgaactaaagctccctcgctccgtgcgctgctacgagcggtgtctcctggggctccaatgcagcgagctgtgcccgaggggttcggaaggcgcaagctgggcagcgacatggggaacgcggagcgggctccggggtctcggagctttgggcccgtacccacgctgctgctgctcgccgcggcgctactggccgtgtcggacgcactcgggcgcccctccgaggaggacgaggagctagtggtgccggagctggagcgcgccccgggacacgggaccacgcgcctccgcctgcacgcctttgaccagcagctggatctggagctgcggcccgacagcagctttttggcgcccggcttcacgctccagaacgtggggcgcaaatccgggtccgagacgccgcttccggaaaccgacctggcgcactgcttctactccggcaccgtgaatggcgatcccagctcggctgccgccctcagcctctgcgagggcgtgcgcggcgccttctacctgctgggggaggcgtatttcatccagccgctgcccgccgccagcgagcgcctcgccaccgccgccccaggggagaagccgccggcaccactacagttccacctcctgcggcggaatcggcagggcgacgtaggcggcacgtgcggggtcgtggacgacgagccccggccgactgggaaagcggagaccgaagacgaggacgaagggactgagggcgaggacgaagggcctcagtggtcgccgcaggacccggcactgcaaggcgtaggacagcccacaggaactggaagcataagaaagaagcgatttgtgtccagtcaccgctatgtggaaaccatgcttgtggcagaccagtcgatggcagaattccacggcagtggtctaaagcattaccttctcacgttgttttcggtggcagccagattgtacaaacaccccagcattcgtaattcagttagcctggtggtggtgaagatcttggtcatccacgatgaacagaaggggccggaagtgacctccaatgctgccctcactctgcggaacttttgcaactggcagaagcagcacaacccacccagtgaccgggatgcagagcactatgacacagcaattcttttcaccagacaggacttgtgtgggtcccagacatgtgatactcttgggatggctgatgttggaactgtgtgtgatccgagcagaagctgctccgtcatagaagatgatggtttacaagctgccttcaccacagcccatgaattaggccacgtgtttaacatgccacatgatgatgcaaagcagtgtgccagccttaatggtgtgaaccaggattcccacatgatggcgtcaatgctttccaacctggaccacagccagccttggtctccttgcagtgcctacatgattacatcatttctggataatggtcatggggaatgtttgatggacaagcctcagaatcccatacagctcccaggcgatctccctggcacctcgtacgatgccaaccggcagtgccagtttacatttggggaggactccaaacactgccctgatgcagccagcacatgtagcaccttgtggtgtaccggcacctctggtggggtgctggtgtgtcaaaccaaacacttcccgtgggcggatggcaccagctgtggagaagggaaatggtgtatcaacggcaagtgtgtgaacaaaaccgacagaaagcattttgatacgccttttcatggaagctggggaatgtgggggccttggggagactgttcgagaacgtgcggtggaggagtccagtacacgatgagggaatgtgacaacccagtcccaaagaatggagggaagtactgtgaaggcaaacgagtgcgctacagatcctgtaaccttgaggactgtccagacaataatggaaaaacctttagagaggaacaatgtgaagcacacaacgagttttcaaaagcttcctttgggagtgggcctgcggtggaatggattcccaagtacgctggcgtctcaccaaaggacaggtgcaagctcatctgccaagccaaaggcattggctacttcttcgttttgcagcccaaggttgtagatggtactccatgtagcccagattccacctctgtctgtgtgcaaggacagtgtgtaaaagctggttgtgatcgcatcatagactccaaaaagaagtttgataaatgtggtgtttgcgggggaaatggatctacttgtaaaaaaatatcaggatcagttactagtgcaaaacctggatatcatgatatcatcacaattccaactggagccaccaacatcgaagtgaaacagcggaaccagaggggatccaggaacaatggcagctttcttgccatcaaagctgctgatggcacatatattcttaatggtgactacactttgtccaccttagagcaagacattatgtacaaaggtgttgtcttgaggtacagcggctcctctgcggcattggaaagaattcgcagctttagccctctcaaagagcccttgaccatccaggttcttactgtgggcaatgcccttcgacctaaaattaaatacacctacttcgtaaagaagaagaaggaatctttcaatgctatccccactttttcagcatgggtcattgaagagtggggcgaatgttctaagtcatgtgaattgggttggcagagaagactggtagaatgccgagacattaatggacagcctgcttccgagtgtgcaaaggaagtgaagccagccagcaccagaccttgtgcagaccatccctgcccccagtggcagctgggggagtggtcatcatgttctaagacctgtgggaagggttacaaaaaaagaagcttgaagtgtctgtcccatgatggaggggtgttatctcatgagagctgtgatcctttaaagaaacctaaacatttcatagacttttgcacaatggcagaatgcagttaagtggtttaagtggtgttagctttgaggcaaggcaaagtgaggaagggctggtgcagggaaagcaagaaggctggagggatccagcgtatcttgccagtaaccagtgaggtgtatcagtaaggtgggattatgggggtagatagaaaaggagttgaatcatcagagtaaactgccagttgcaaatttgataggatagttagtgaggattattaacctctgagcagtgatatagcataataaanccccgggcattattattattatttcttttgttacatctattacaagtttagaaaaaacaaagcaattgtcaaaaaaaaaaaaaaaaaaaaaaaaaaaa

SEQ ID NO: 99 - DNA, 772 bp, Homo sapiens
cgcagcgggtcctctctatctagctccagcctctcgcctgcgccccactccccgcgtcccgcgtcctagccgaccatggccgggcccctgcgcgccccgctgctcctgctggccatcctggccgtggccctggccgtgagccccgcggccggctccagtcccggcaagccgccgcgcctggtgggaggccccatggacgccagcgtggaggaggagggtgtgcggcgtgcactggactttgccgtcggcgagtacaacaaagccagcaacgacatgtaccacagccgcgcgctgcaggtggtgcgcgcccgcaagcagatcgtagctggggtgaactacttcttggacgtggagctgggccgaaccacgtgtaccaagacccagcccaacttggacaactgccccttccatgaccagccacatctgaaaaggaaagcattctgctctttccagatctacgctgtgccttggcagggcacaatgaccttgtcgaaatccacctgtcaggacgcctaggggtctgtaccgggctggcctgtgcctatcacctcttatgcacacctcccaccccctgtattcccacccctggactggtggcccctgccttggggaaggtctccccatgtgcctgcaccaggagacagacagagaaggcagcaggcggcctttgttgctcagcaaggggctctgccctccctccttccttcttgcttctcatagccccggtgtgcggtgcatacacccccacctcctgcaataaaatagtagcatc

SEQ ID NO: 100 - DNA, 2657 bp, Homo sapiens
  modified_base (2623)..(2629): a, c, g, t, other or unknown
gaattcggcacgagctgcagggtcaggaggagaatcgtggggccaggagggcagaggcacactccatcttcgtgctcctcacaggccctgcctccctgcctgctaaggacacagggaagggggtccccacctcagtgcctgcctcccttccctgtgcctgtgtacctggcagtcacagccacctggcgtgtcccagaaaccaaccggctgacctcatctcctgcccggccccacctccattggctttggcttttggcgtttgtgctgcccgaccctttctcctgtccggatgcgcagggcagggcctgagccgtcgagctgcacccacagcaggctgcctttggtgactcaccgggtgaacgggggcattgcgaggcatcccctccctgggtttggctcctgcccacggggctgacagtagaaatcacaggctgtgagacagctggagcccagctctgcttgaacctattttaggtctctgatccccgcttcctctttagactcccctagagctcagccagtgctcaacctgaggctgggggtctctgaggaagagtgagttggagctgaggggtctggggctgtcccctgagagaggggccagaggcagtgtcaagagccgggcagtctgattgtggctcaccctccatcactcccagggcccctggcccagcagccgcagctcccaaccacaatatcctttggggtttggcctacggagctggggcggatgacccccaaatagccctggcagattccccctagacccgcccgcaccatggtcaggcatgcccctcctcatcgctggcacagcccagagggtataaacagtgctggaggctggcggggcaggccagctgagtcctgagcagcagcccagcggatcctgagaacttcagggtgagtttggggacccttgattgttctttctttttcgctattgtaaaattcatgttatatggagggggcaaagttttcagggtgttgtttagaatgggaagatgtcccttgtatcaccatggaccctcatgataattttgtttctttcactttctactctgttgacaaccattgtctcctcttattttcttttcattttctgtaactttttcgttaaactttagcttgcatttgtaacgaatttttaaattcacttttgtttatttgtcagattgtaagtactttctctaatcacttttttttcaaggcaatcagggtatattatattgtacttcagcacagttttagagaacaattgttataattaaatgataaggtagaatatttctgcatataaattctggctggcgtggaaatattcttattggtagaaacaactacatcctggtcatcatcctgcctttctctttatggttacaatgatatacactgtttgagatgaggataaaatactctgagtccaaaccgggcccctctgctaaccatgttcatgccttcttctttttcctacagctcctgggcaacgtgctggttgttgtgctgtctcatcattttggcaaagaattaattccaactcaaaaatgcaggctcaacagtaccagcagcagcgtcgaaaatttgcagctgccttcttggcattcattttcatactggcagctgtggatactgctgaagcagggaagaaagagaaaccagaaaaaaaagtgaagaagtctgactgtggagaatggcagtggagtgtgtgtgtgcccaccagtggagactgtgggctgggcacacgggagggcactcggactggagctgagtgcaagcaaaccatgaagacccagagatgtaagatcccctgcaactggaagaagcaatttggcgcggagtgcaaataccagttccaggcctggggagaatgtgacctgaacacagccctgaagaccagaactggaagtctgaagcgagccctgcacaatgccgaatgccagaagactgtcaccatctccaagccctgtggcaaactgaccaagcccaaacctcaagcagaatctaagaagaagaaaaaggaaggcaagaaacaggagaagatgctggattaaaagatgtcacctgtggaacataaaaaggacatcagcaaacaggatcaattcactcctcaggtgcaggctgcctatcagaaggtggtggctggtgtggccaatgccctggctcacaaataccactgagatctttttccctctgccaaaaattatggggacatcatgaagccccttgagcatctgacttctggctaataaaggaaatttattttcattgcaatagtgtgttggaattttttgtgtctctcactcggaaggacatatgggagggcaaatcatttaaaacatcagaatgagtatttggtttagagtttggcaacatatgccatatgctggctgccatgaacaaaggtggctataaagaggtcatcagtatatgaaacagccccctgctgtccattccttattccatagaaaagccttgacttgaggttagattttttttatattttgttttgtgttatttttttctttaacatccctaaaattttccttacatgttttactagccagatttttcctcctctcctgactactcccagtcatagctgtccctcttctcttatgaagatctnnnnnnnctcgacctgcaggcaggcatgcaagctt

SEQ ID NO: 101 - DNA, 3552 bp, Homo sapiens
atgcccggcgtggcccgcctgccgctgctgctcgggctgctgctgctcccgcgtcccggccggccgctggacttggccgactacacctatgacctggcggaggaggacgactcggagcccctcaactacaaagacccctgcaaggcggctgcctttcttggggacattgccctggacgaagaggacctgagggccttccaggtacagcaggctgtggatctcagacggcacacagctcgtaagtcctccatcaaagctgcagttccaggaaacacttctacccccagctgccagagcaccaacgggcagcctcagaggggagcctgtgggagatggagaggtagatcccgtagccggcgggcggcgacgtcccgaccagagcgtgtgtggcccgatggggtcatcccctttgtcattgggggaaacttcactggtagccagagggcagtcttccggcaggccatgaggcactgggagaagcacacctgtgtcaccttcctggagcgcactgacgaggacagctatattgtgttcacctatcgaccttgcgggtgctgctcctacgtgggtcgccgcggcgggggcccccaggccatctccatcggcaagaactgtgacaagttcggcattgtggtccacgagctgggccacgtcgtcggcttctggcacgaacacactcggccagaccgggaccgccacgtttccatcgttcgtgagaacatccagccagggcaggagtataacttcctgaagatggagcctcaggaggtggagtccctgggggagacctatgacttcgacagcatcatgcattacgctcggaacacattctccaggggcatcttcctggataccattgtccccaagtatgaggtgaacggggtgaaacctcccattggccaaaggacacggctcagcaagggggacattgcccaagcccgcaagctttacaagtgcccagcctgtggagagaccctgcaagacagcacaggcaacttctcctcccctgaataccccaatggctactctgctcacatgcactgcgtgtggcgcatctctgtcacacccggggagaagatcatcctgaacttcacgtccctggacctgtaccgcagccgcctgtgctggtacgactatgtggaggtccgagatggcttctggaggaaggcgcccctccgaggccgcttctgcgggtccaaactccctgagcctatcgtctccactgacagccgcctctgggttgaattccgcagcagcagcaattgggttggaaagggcttctttgcagtctacgaagccatctgcgggggtgatgtgaaaaaggactatggccacattcaatcgcccaactacccagacgattaccggcccagcaaagtctgcatctggcggatccaggtgtctgagggcttccacgtgggcctcacattccagtcctttgagattgagcgccacgacagctgtgcctacgactatctggaggtgcgcgacgggcacagtgagagcagcaccctcatcgggcgctactgtggctatgagaagcctgatgacatcaagagcacgtccagccgcctctggctcaagttcgtctctgacgggtccattaacaaagcgggctttgccgtcaactttttcaaagaggtggacgagtgctctcggcccaaccgcgggggctgtgagcagcggtgcctcaacaccctgggcagctacaagtgcagctgtgaccccgggtacgagctggccccagacaagcgccgctgtgaggctgcttgtggcggattcctcaccaagctcaacggctccatcaccagcccgggctggcccaaggagtacccccccaacaagaactgcatctggcagctggtggcccccacccagtaccgcatctccctgcagtttgacttctttgagacagagggcaatgatgtgtgcaagtacgacttcgtggaggtgcgcagtggactcacagctgactccaagctgcatggcaagttctgtggttctgagaagcccgaggtcatcacctcccagtacaacaacatgcgcgtggagttcaagtccgacaacaccgtgtccaaaaagggcttcaaggcccacttcttctcagacaaggacgagtgctccaaggataacggcggctgccagcaggactgcgtcaacacgttcggcagttatgagtgccaatgccgcagtggcttcgtcctccatgacaacaagcacgactgcaaagaagccggctgtgaccacaaggtgacatccaccagtggtaccatcaccagccccaactggcctgacaagtatcccagcaagaaggagtgcacgtgggccatctccagcacccccgggcaccgggtcaagctgaccttcatggagatggacatcgagtcccagcctgagtgtgcctacgaccacctagaggtgttcgacgggcgagacgccaaggcccccgtcctcggccgcttctgtgggagcaagaagcccgagcccgtcctggccacaggcagccgcatgttcctgcgcttctactcagataactcggtccagcgaaagggcttccaggcctcccacgccacagagtgcgggggccaggtacgggcagacgtgaagaccaaggacctttactcccacgcccagtttggcgacaacaactaccctgggggtgtggactgtgagtgggtcattgtggccgaggaaggctacggcgtggagctcgtgttccagacctttgaggtggaggaggagaccgactgcggctatgactacatggagctcttcgacggctacgacagcacagcccccaggctggggcgctactgtggctcagggcctcctgaggaggtgtactcggcgggagattctgtcctggtgaagttccactcggatgacaccatcaccaaaaaaggtttccacctgcgatacaccagcaccaagttccaggacacactccacagcaggaagtgaccactgcctgagcaggggcggggactggagcctgctgcccttggtcgcctagactggatagtgggggtgggcggaacgcaacgcaccatccctctcccccaggccccaggacctgcagggccaatggcctggtgagactgtccataggaggtgggggaactggactccggcataagccacttccccacaaacccccaccagcaaggggctggggccagggagcagagcttccacaagacatttcgaagtcatcattcctctcttagggggccctgcctggtggcaagagggaatgtcagcaggaccccatcgccatccctgtgtctctacacgctgtattgtgtatcaccgggggcattattttcattgtaatgttcatttcccacccctgctccagcctcgatttggttttattttgagcccccattccaccacagtttcctggggcacaagtgtctgtgcatgtcccccaggagccaccgtggggagccgatggggaggggatggagaaacaagacagggcttctctcagcccatggccggtcagccacaccagggcaccgcagccaataaaccgaaagtgttacagcc

SEQ ID NO: 102 - DNA, 1679 bp, Homo sapiens
atgacgaagaacgagaagaagtccctcaaccagagcctggccgagtggaagctcttcatctacaacccgaccaccggagaattcctggggcgcaccgccaagagctggggtttgatcttgctcttctacctagttttttatgggttcctggctgcactcttctcattcacgatgtgggttatgcttcagactctcaacgatgaggttccaaaataccgtgaccagattcctagcccaggactcatggtttttccaaaaccagtgaccgcattggaatatacattcagtaggtctgatccaacttcgtatgcagggtacattgaagaccttaagaagtttctaaaaccatatactttagaagaacagaagaacctcacagtctgtcctgatggagcactttttgaacagaagggtccagtttatgttgcatgtcagtttcctatttcattacttcaagcatgcagtggtatgaatgatcctgattttggctattctcaaggaaacccttgtattcttgtgaaaatgaacagaataattggattaaagcctgaaggagtgccaaggatagattgtgtttcaaagaatgaagatataccaaatgtagcagtttatcctcataatggaatgatagacttaaaatatttcccatattatgggaaaaaactgcatgttgggtatctacagccattggttgctgttcaggtcagctttgctcctaacaacactgggaaagaagtaacagttgagtgcaagattgatggatcagccaacctaaaaagtcaggatgatcgtgacaagtttttgggacgagttatgttcaaaatcacagcacgtgcatagtatgagtaggatatctccacagagtaaatgttgtgttgtctgtcttcattttgtaacagctggaccttccattctagaattatgagaccaccttggagaaaggtgtgtggtacatgacattgggttacatcataacgtgcttccagatcatagtgttcagtgtcctctgaagtaactgcctgttgcctctgctgccctttgaaccagtgtacagtcgccagatagggaccggtgaacacctgattccaaacatgtaggatgggggtcttgtcctctttttatgtggtttaattgccaagtgtctaaagcttaatatgccgtgctatgtaaatattttatggatataacaactgtcatattttgatgtcaacagagttttagggataaaatggtacccggccaacatcaagtgactttatagctgcaagaaatgtggtatgtggagaagttctgtatgtgaggaaggaaaaaaagaaaataaaagtgtgtttgaaaaatattatcttgggttctttgtaaaatttattttttacatgctgaattagcctcgatctttttgattaagagcacaaacttttttttgtaaaacatgtaaaaaaaaaaactgggattaatttttagtgttggaactgcctcttattttaggctgtagataaaatagcatttttaggttagccagtgtgactatgcacctaattttttatgagattaaattcataagacttaatttgtacaatagtttgtgaaatatcttgttactgcttttatttagcagactgtggactgtaataaagtatataaattgtgaaatataaaaacttggaacttattcaaagctt

SEQ ID NO: 103 - DNA, 2971 bp, Homo sapiens
  modified_base (2872): a, c, g, t, other or unknown
  modified_base (2886): a, c, g, t, other or unknown
  modified_base (2893): a, c, g, t, other or unknown
  modified_base (2896): a, c, g, t, other or unknown
  modified_base (2946): a, c, g, t, other or unknown
caagtggtaaccctcaaaccaccacacggaaattggaggatcactgcttttaccacggcacggtgagggagacagaactgtccagcgtcacgctcagcacttgccgaggaattagaggactgattacggtgagcagcaacctcagctacgtcatcgagcccctccctgacagcaagggccaacaccttatttacagatctgaacatctcaagccgcccccgggaaactgtgggttcgagcactccaagcccaccaccagggactgggctcttcagtttacacaacagaccaagaagcgacctcgcaggatgaaaagggaagatttaaactccatgaagtatgtggagctttacctcgtggctgattatttagagtttcagaagaatcgacgagaccaggacgccaccaaacacaagctcatagagatcgccaactatgttgataagttttaccgatccttgaacatccggattgctctcgtgggcttggaagtgtggacccacgggaacatgtgtgaagtttcagagaatccatattctaccctctggtcctttctcagttggaggcgcaagctgcttgcccagaagtaccatgacaacgcccaattaatcacgggcatgtccttccacggcaccaccatcggcctggcccccctcatggccatgtgctctgtgtaccagtctggaggagtcaacatggaccactccgagaatgccattggcgtggctgccaccatggcccacgagatgggccacaactttggcatgacccatgattctgcagattgctgctcggccagtgcggctgatggtgggtgcatcatggcagctgccactgggcacccctttcccaaagtgttcaatggatgcaacaggagggagctggacaggtatctgcagtcaggtggtggaatgtgtctctccaacatgccagacaccaggatgttgtatggaggccggaggtgtgggaacgggtatctggaagatggggaagagtgtgactgtggagaagaagaggaatgtaacaacccctgctgcaatgcctctaattgtaccctgaggccgggggcggagtgtgctcacggctcctgctgccaccagtgtaagctgttggctcctgggaccctgtgccgcgagcaggccaggcagtgtgacctcccggagttctgtacgggcaagtctccccactgccctaccaacttctaccagatggatggtaccccctgtgagggcggccaggcctactgctacaacggcatgtgcctcacctaccaggagcagtgccagcagctgtggggacccggagcccgacctgcccctgacctctgcttcgagaaggtgaatgtggcaggagacacctttggaaactgtggaaaggtcatgaatggtgaacacaggaagtgcaacatgagagatgcgaagtgtgggaagatccagtgtcagagctctgaggcccggcccctggagtccaacgcggtgcccattgacaccactatcatcatgaatgggaggcagatccagtgccggggcacccacgtctaccgaggtcctgaggaggagggtgacatgctgaacccagggctggtgatgactggaaccaagtgtggctacaaccatatttgctttgaggggcagtgcaggaacacctccttctttgaaactgaaggctgtgggaagaagtgcaatggccatggggtctgtaacaacaaccagaactgccactgcctgccgggctgggccccgcccttctgcaacacaccgggccacgggggcagtatcgacagtgggcctatgccccctgagagtgtgggtcctgtggtagctggagtgttggtggccatcttggtgctggcggtcctcatgctgatgtactactgctgcagacagaacaacaaactaggccaactcaagccctcagctctcccttccaagctgaggcaacagttcagttgtcccttcagggtttctcagaacagcgggactggtcatgccaacccaactttcaagctgcagacgccccagggcaagcgaaaggtgatcaacactccggaaatcctgcggaagccctcccagcctcctccccggccccctccagattatctgcgtggtgggtccccacctgcaccactgccagctcacctgagcagggctgctaggaactccccagggcccgggtctcaaatagagaggacggagtcgtccaggaggcctcctccaagccggccaattccccccgcaccaaattgcatcgtttcccaggacttctccaggcctcggccgccccagaaggcactcccggcaaacccagtgccaggccgcaggagcctccccaggccaggaggtgcatccccactgcggccccctggtgctggccctcagcagtcccggcctctggcagcacttgccccaaaggtgagtccacgggaagccctcaaggtgaaagctggtaccagagggctccaggggggcaggtgtagagttgagaaaacaaagcaattcatgcttcttgtggtctggactgaacttccagaacaaaagccaagggcaaaacattcatgtttcttggtgcccgcttgactgtggagttttggcttcatgtgaaaggtgattcttagaatcctgagctgtggtggcttcagtcctgcccctgcacctgacctggggagggaccctgagcaagtccctcttgagtctgtttcctcatttgtacagaggctatgatgagcagtagtaccagccccatcaggttgttgtgaagagcaaggaagtgcattagtagaaccacctggcctgcgggaggctgtgtacacttggccccttctcgtacttcttctgtgtggctgacagtctcagtttgccagtcttgcaatcangtcagaaagggatnagtgaanaanctggcttgacatgctgtattccacgaggcattgagaaaactatggactgngctgctgccttaacagggaagggaa

SEQ ID NO: 104 - DNA, 3486 bp, Homo sapiens
ggccacgatggagcgcgacggctgcgcggggggcgggagccgcggcggcgagggcgggcgcgctccccgggagggcccggcggggaacggccgcgatcggggccgcagccacgctgccgaggcgcccggggacccgcaggcggccgcgtccttgctggcccctatggacgtgggggaggagccgctggagaaggcggcgcgcgcccgcactgccaaggaccccaacacctataaagtactctcgctggtattgtcagtatgtgtgttaacaacaatacttggttgtatatttgggttgaaaccaagctgtgccaaagaagttaaaagttgcaaaggtcgctgtttcgagagaacatttgggaactgtcgctgtgatgctgcctgtgttgagcttggaaactgctgtttagattaccaggagacgtgcatagaaccagaacatatatggacttgcaacaaattcaggtgtggtgagaaaaggttgaccagaagcctctgtgcctgttcagatgactgcaaggacaagggcgactgctgcatcaactacagttctgtgtgtcaaggtgagaaaagttgggtagaagaaccatgtgagagcattaatgagccacagtgcccagcagggtttgaaacgcctcctaccctcttattttctttggatggattcagggcagaatatttacacacttggggtggacttcttcctgttattagcaaactaaaaaaatgtggaacatatactaaaaacatgagaccggtatatccaacaaaaactttccccaatcactacagcattgtcaccggattgtatccagaatctcatggcataatcgacaataaaatgtatgatcccaaaatgaatgcttccttttcacttaaaagtaaagagaaatttaatcctgagtggtacaaaggagaaccaatttgggtcacagctaagtatcaaggcctcaagtctggcacatttttctggccaggatcagatgtggaaattaacggaattttcccagacatctataaaatgtataatggttcagtaccatttgaagaaaggattttagctgttcttcagtggctacagcttcctaaagatgaaagaccacacttttacactctgtatttagaagaaccagattcttcaggtcattcatatggaccagtcagcagtgaagtcatcaaagccttgcagagggttgatggtatggttggtatgctgatggatggtctgaaagagctgaacttgcacagatgcctgaacctcatccttatttcagatcatggcatggaacaaggcagttgtaagaaatacatatatctgaataaatatttgggggatgttaaaaatattaaagttatctatggacctgcagctcgattgagaccctctgatgtcccagataaatactattcatttaactatgaaggcattgcccgaaatctttcttgccgggaaccaaaccagcacttcaaaccttacctgaaacatttcttacctaagcgtttgcactttgctaagagtgatagaattgagcccttgacattctatttggaccctcagtggcaacttgcattgaatccctcagaaaggaaatattgtggaagtggatttcatggctctgacaatgtattttcaaatatgcaagccctctttgttggctatggacctggattcaagcatggcattgaggctgacacctttgaaaacattgaagtctataacttaatgtgtgatttactgaatttgacaccggctcctaataacggaactcatggaagtcttaaccaccttctaaagaatcctgtttatacgccaaagcatcccaaagaagtgcaccccctggtacagtgccccttcacaagaaaccccagagataaccttggctgctcatgtaacccttcgattttgccgattgaggattttcaaacacagttcaatctgactgtggcagaagagaagattattaagcatgaaactttaccctatggaagacctagagttctccagaaggaaaacaccatctgtcttctttcccagcaccagtttatgagtggatacagccaagacatcttaatgcccctttggacatcctataccgtggacagaaatgacagtttctctacggaagacttctccaactgtctgtaccaggactttagaattcctcttagtcctgtccataaatgttcattttataaaaataacaccaaagtgagttacgggttcctctccccaccacaactaaataaaaattcaagtggaatatattctgaagctttgcttactacaaatatagtgccaatgtaccagagttttcaagttatatggcgctactttcatgacaccctactgcgaaagtatgctgaagaaagaaatggtgtcaatgtcgtcagtggtcctgtgtttgactttgattatgatggacgttgtgattccttagagaatctgaggcaaaaaagaagagtcatccgtaaccaagaaattttgattccaactcacttctttattgtgctaacaagctgtaaagatacatctcagacgcctttgcactgtgaaaacctagacaccttagctttcattttgcctcacaggactgataacagcgagagctgtgtgcatgggaagcatgactcctcatgggttgaagaattgttaatgttacacagagcacggatcacagatgttgagcacatcactggactcagcttctatcaacaaagaaaagagccagtttcagacattttaaagttgaaaacacatttgccaacctttagccaagaagactgatatgttttttatccccaaacaccatgaatctttttgagagaaccttatattttatatagtcctctagctacactattgcattgttcagaaactgtcgaccagagttagaacggagccctcggtgatgcggacatctcagggaaacttgcgtactcagcacagcagtggagagtgttcctgttgaatcttgcacatatttgaatgtgtaagcattgtatacattgatcaagttcgggggaataaagacagaccacacctaaaactgcctttctgcttctcttaaaggagaagtagctgtgaacattgtctggataccagatatttgaatctttcttactattggtaataaaccttgatggcattgggcaaacagtagacttatagtagggttggggtagcccatgttatgtgactatctttatgagaattttaaagtggttctggatatcttttaacttggagtttcatttcttttcattgtaatcaaaaaaaaaattaacagaagccaaaatacttctgagaccttgtttcaatctttgctgtatatcccctcaaaatccaagttattaatcttatgtgttttctttttaattttttgattggatttctttagatttaatggttcaaatgagttcaactttgagggacgatctttgaatatacttacctattataaaatcttactttgtatttgtatttaa

SEQ ID NO: 105 - DNA, 3437 bp, Homo sapiens
aagttcagtgcctaccgaagacaaaggcgccccgagggagtggcggtgcgaccccagggcgtgggcccggccgcggagcccacactgcccggctgacccggtggtctcggaccatgtctcccgccccaagacccccccgttgtctcctgctccccctgctcacgctcggcaccgcgctcgcctccctcggctcggcccaaagcagcagcttcagccccgaagcctggctacagcaatatggctacctgcctcccggggacctacgtacccacacacagcgctcaccccagtcactctcagcggccatcgctgccatgcagaagttttacggcttgcaagtaacaggcaaagctgatgcagacaccatgaaggccatgaggcgcccccgatgtggtgttccagacaagtttggggctgagatcaaggccaatgttcgaaggaagcgctacgccatccagggtctcaaatggcaacataatgaaatcactttctgcatccagaattacacccccaaggtgggcgagtatgccacatacgaggccattcgcaaggcgttccgcgtgtgggagagtgccacaccactgcgcttccgcgaggtgccctatgcctacatccgtgagggccatgagaagcaggccgacatcatgatcttctttgccgagggcttccatggcgacagcacgcccttcgatggtgagggcggcttcctggcccatgcctacttcccaggccccaacattggaggagacacccactttgactctgccgagccttggactgtcaggaatgaggatctgaatggaaatgacatcttcctggtggctgtgcacgagctgggccatgccctggggctcgagcattccagtgacccctcggccatcatggcacccttttaccagtggatggacacggagaattttgtgctgcccgatgatgaccgccggggcatccagcaactttatgggggtgagtcagggttccccaccaagatgccccctcaacccaggactacctcccggccttctgttcctgataaacccaaaaaccccacctatgggcccaacatctgtgacgggaactttgacaccgtggccatgctccgaggggagatgtttgtcttcaaggagcgctggttctggcgggtgaggaataaccaagtgatggatggatacccaatgcccattggccagttctggcggggcctgcctgcgtccatcaacactgcctacgagaggaaggatggcaaattcgtcttcttcaaaggagacaagcattgggtgtttgatgaggcgtccctggaacctggctaccccaagcacattaaggagctgggccgagggctgcctaccgacaagattgatgctgctctcttctggatgcccaatggaaagacctacttcttccgtggaaacaagtactaccgtttcaacgaagagctcagggcagtggatagcgagtaccccaagaacatcaaagtctgggaagggatccctgagtctcccagagggtcattcatgggcagcgatgaagtcttcacttacttctacaaggggaacaaatactggaaattcaacaaccagaagctgaaggtagaaccgggctaccccaagtcagccctgagggactggatgggctgcccatcgggaggccggccggatgaggggactgaggaggagacggaggtgatcatcattgaggtggacgaggagggcggcggggcggtgagcgcggctgccgtggtgctgcccgtgctgctgctgctcctggtgctggcggtgggccttgcagtcttcttcttcagacgccatgggacccccaggcgactgctctactgccagcgttccctgctggacaaggtctgacgcccaccgccggcccgcccactcctaccacaaggactttgcctctgaaggccagtggcagcaggtggtggtgggtgggctgctcccatcgtcccgagccccctccccgcagcctccttgcttctctctgtcccctggctggcctccttcaccctgaccgcctccctccctcctgccccggcattgcatcttccctagataggtcccctgagggctgagtgggagggcggccctttccagcctctgcccctcaggggaaccctgtagctttgtgtctgtccagccccatctgaatgtgttgggggctctgcacttgaaggcaggaccctcagacctcgctggtaaaggtcaaatggggtcatctgctccttttccatcccctgacataccttaacctctgaactctgacctcaggaggctctgggcactccagccctgaaagccccaggtgtacccaattggcagcctctcactactctttctggctaaaaggaatctaatcttgttgagggtagagaccctgagacagtgtgagggggtggggactgccaagccaccctaagaccttgggaggaaaactcagagagggtcttcgttgctcagtcagtcaagttcctcggagatctgcctctgcctcacctaccccagggaacttccaaggaaggagcctgagccactggggactaagtgggcagaagaaacccttggcagccctgtgcctctcgaatgttagccttggatggggctttcacagttagaagagctgaaaccaggggtgcagctgtcaggtagggtggggccggtgggagaggcccgggtcagagccctgggggtgagcctgaaggccacagagaaagaaccttgcccaaactcaggcagctggggctgaggcccaaaggcagaacagccagagggggcaggaggggaccaaaaaggaaaatgaggacgtgcagcagcattggaaggctggggccgggcaggccaggccaagccaagcagggggccacagggtgggctgtggagctctcaggaagggccctgaggaaggcacacttgctcctgttggtccctgtccttgctgcccaggcagcgtggaggggaagggtagggcagccagagaaaggagcagagaaggcacacaaacgaggaatgaggggcttcacgagaggccacagggcctggctggccacgctgtcccggcctgctcaccatctcagtgaggggcaggagctggggctcgcttaggctgggtccacgcttccctggtgccagcacccctcaagcctgtctcaccagtggcctgccctctcgctcccccacccagcccacccattgaagtctccttgggccaccaaaggtggtggccatggtaccggggacttgggagagtgagacccagtggagggagcaagaggagagggatgtcgggggggtggggcacggggtaggggaaatggggtgaacggtgctggcagttcggctagatttctgtcttgtttgtttttttgttttgtttaatgtatatttttattataattattatatatgaattccaaaaaaaaaaaaaaaaaaaaa

SEQ ID NO: 106 - DNA, 2997 bp, Homo sapiens
ggactgcggtctcgggcagcaatggccgagaagcgcgacacacgggactccgaagcccagcggctccccgactccttcaaggacagccccagtaagggccttggaccttgcggatggattttggtggcgttctcattcttattcaccgttataactttcccaatctcaatatggatgtgcataaagattataaaagagtatgaaagagccatcatctttagattgggtcgcattttacaaggaggagccaaaggacctggtttgttttttattctgccatgcactgacagcttcatcaaagtggacatgagaactatttcatttgatattcctcctcaggagatcctgacaaaggattcagtgacaattagcgtggatggtgtggtctattaccgcgttcagaatgcaaccctggctgtggcaaatatcaccaacgctgactcagcaacccgtcttttggcacaaactactctgaggaatgttctgggcaccaagaatctttctcagatcctctctgacagagaagaaattgcacacaacatgcagtctactctggatgatgccactgatgcctggggaataaaggtggagcgtgtggaaattaaggatgtgaaactacctgtgcagctccagagagctatggctgcagaagcagaagcgtcccgcgaggcccgcgccaaggttattgcagccgaaggagaaatgaatgcatccagggctctgaaagaagcctccatggtcatcactgaatctcctgcagcccttcagctccgatacctgcagacactgaccaccattgctgctgagaaaaactcaacaattgtcttccctctgcccatagatatgctgcaaggaatcataggggcaaaacacagccatctaggctagtgtagagatgagcgctagccttccaagcatgaagtcggggaccaaattagcctttaactcataaagagagggtagggcttttctttttccatatgtcaattgtggtgttcccagaatgtatagcagttataaaaataggtgaaagaattgttagcttgtaaatactgagagattggtgatttatataaggtaatctgttagtcttaaaatagttaaaagtttgtatttttagattattatgtagtaggttagatccctcttgttttgacttccactgactcattctgaaccccctaagcacccaggccacaggcaagaacctgggctgtaactgccacctgacaccgctgactggctaaatgctttgcagaaagtgatgaccttacaccacaaccagcttctccaggtcatatgtgccttacctccagaagtctttttttttttttttttctgagatggagtttcactcttgttgcccaggctggagtgcaatagcatgatctcggctcactgcaacctccgcctcctgggttcaagagattctcctgcctcagcctccccagtagctgggattacaggctcatgccaccatgcccagctaatttttgtattattattattgttttttagtagagacggggtttcaccatgttggccaggctagtcacgaactcctaacctcaggtgatccacccacctctgcctccaaagtgctggattacaggctgagctaccaccctggtttggagagtcttaattaattgaaatttccctaatgttcatttattttctaaatccagccgtgtttcagaataatccttacttgagagtagccattttcttgtgtacttgtcagaactagaggaaatagccaagactaatgaaaaacattactctaacccttaaaagacttttaaattcactactagagtggtcattttaaaaatacatccatgttttaacttattttgagcctttcttttatgagtaaatgattcctccttgttctgtctttcaaaccagctaaatatttgtcacaaaagtgacttttttctcactgttgcctattttcatatatcaggttttaaatagttttaattttttaataaaatttttctctacgttctatatgcaattgttatatatctatttgaatagctgaaggactaaaatacttttttaagagataacttcaggaaaccattatattttactatctgcatgctgttaactgtggtacactgtgaaatatgttgattacaaacccattcattacatagtataaggaattcacagtatattgactatatagtgtctaatgactgggcagatactgtcaacttacaatatctatatagagaggctttaaacttaccttactcattctctatgatgtatgacttgatgctgaaagaggaagctggtcagctcctcatggacaacaaattcttagtctataatattaggagacatctctagttttgcaaatgtctgtgaatctgagcaacctggacttctgcttactggccagaaagctggcgggtgacatttgtaacatttcctctttgagactctgagttcacctagagaagtctaagcataacagctttctttcccagcacgagcctttatagctctctttagctcaaccactctgtccatccagccaatggatgtccttccctgtacccaattcaagcttattttagggaagccttgaaactaccatgtatctggctctagctgagttattgaggattgagccagtgcaacgttaaactcagtgcacttacatttgatttaaatgatggttttatctgttgtgtgaagtggttcacccttgaggaccaggagcctccatatcctgactgaaaaccttttctgagacttagagtaacagtacttttggttccttgagttctcctgtctccagatacctaaatgaccttgacttttctgccttgtgaattcgtagtccaatcagctgaaattaaatcacttgggagggacgcatagaaggagctctaggaacacagtgccagtgcagaagtttctccaggtggcctccctttccaacaatgtacataataaagtgtatgcactttcact

SEQ ID NO: 107 - DNA, 1973 bp, Homo sapiens
gggaaggcgagcagtgccaatctacagcgaagaaagtctcgtttggtaaaagcgagaggggaaagcctgagcatgcagagtgtgcagagcacgagcttttgtctccgaaagcagtgcctttgcctgaccttcctgcttctccatctcctgggacaggtcgctgcgactcagcgctgccctccccagtgcccgggccggtgccctgcgacgccgccgacctgcgcccccggggtgcgcgcggtgctggacggctgctcatgctgtctggtgtgtgcccgccagcgtggcgagagctgctcagatctggagccatgcgacgagagcagtggcctctactgtgatcgcagcgcggaccccagcaaccagactggcatctgcacggcggtagagggagataactgtgtgttcgatggggtcatctaccgcagtggagagaaatttcagccaagctgcaaattccagtgcacctgcagagatgggcagattggctgtgtgccccgctgtcagctggatgtgctactgcctgagcctaactgcccagctccaagaaaagttgaggtgcctggagagtgctgtgaaaagtggatctgtggcccagatgaggaggattcactgggaggccttacccttgcagcttacaggccagaagccaccctaggagtagaagtctctgactcaagtgtcaactgcattgaacagaccacagagtggacagcatgctccaagagctgtggtatggggttctccacccgggtcaccaataggaaccgtcaatgtgagatgctgaaacagactcggctctgcatggtgcggccctgtgaacaagagccagagcagccaacagataagaaaggaaaaaagtgtctccgcaccaagaagtcactcaaagccatccacctgcagttcaagaactgcaccagcctgcacacctacaagcccaggttctgtggggtctgcagtgatggccgctgctgcactccccacaataccaaaaccatccaggcagagtttcagtgctccccagggcaaatagtcaagaagccagtgatggtcattgggacctgcacctgtcacaccaactgtcctaagaacaatgaggccttcctccaggagctggagctgaagactaccagagggaaaatgtaacctgtcactcaagaagcacacctacagagcacctgtagctgctgcgccacccaccatcaaaggaatataagaaaagtaatgaagaatcacgatttcatccttgaatcctatgtattttcctaatgtgatcatatgaggacctttcatatctgtcttttatttaacaaaaaatgtaattaactgtaaacttggaatcaaggtaagctcaggatatggcttaggaatgacttactttcctgtggttttattacaaatgcaaatttctataaatttaagaaaacaagtatataatttactttgtagactgtttcacattgcactcatcatattttgttgtgcactagtgcaattccaagaaaatatcactgtaatgagtcagtgaagtctagaatcatacttaacatttcattgtacaagtattacaaccatatattgaggttcattgggaagattctctattggctccctttttgggtaaaccagctctgaacttccaagctccaaatccaaggaaacatgcagctcttcaacatgacatccagagatgactattacttttctgtttagttttacactaggaacgtgttgtatctacagtaatgaaatgtttactaagtggactggtgtcataacttctccattagacacatgactccttccaatagaaagaaactaaacagaaaactcccaatacaaagatgactggtccctcatagccctcagacatttatatattggaagctgctgaggcccccaagttttttaattaagcagaaacagcatattagcagggattctctcatctaactgatgagtaaactgaggcc

SEQ ID NO: 108 - DNA, 2110 bp, Homo sapiens
caggccgaggcagggagaactctccactcggaggaggagctggggtcctcttccatcccgtcttcatcctgcctggctgcgtgacctcgggaggcaccatgcaggagctgcatctgctctggtgggcgcttctcctgggcctggctcaggcctgccctgagccctgcgactgtggggaaaagtatggcttccagatcgccgactgtgcctaccgcgacctagaatccgtgccgcctggcttcccggccaatgtgactacactgagcctgtcagccaaccggctgccaggcttgccggagggtgccttcagggaggtgcccctgctgcagtcgctgtggctggcacacaatgagatccgcacggtggccgccggagccctggcctctctgagccatctcaagagcctggacctcagccacaatctcatctctgactttgcctggagcgacctgcacaacctcagtgccctccaattgctcaagatggacagcaacgagctgaccttcatcccccgcgacgccttccgcagcctccgtgctctgcgctcgctgcaactcaaccacaaccgcttgcacacattggccgagggcaccttcaccccgctcaccgcgctgtcccacctgcagatcaacgagaaccccttcgactgcacctgcggcatcgtgtggctcaagacatgggccctgaccacggccgtgtccatcccggagcaggacaacatcgcctgcacctcaccccatgtgctcaagggtacgccgctgagccgcctgccgccactgccatgctcggcgccctcagtgcagctcagctaccaacccagccaggatggtgccgagctgcggcctggttttgtgctggcactgcactgtgatgtggacgggcagccggcccctcagcttcactggcacatccagatacccagtggcattgtggagatcaccagccccaacgtgggcactgatgggcgtgccctgcctggcacccctgtggccagctcccagccgcgcttccaggcctttgccaatggcagcctgcttatccccgactttggcaagctggaggaaggcacctacagctgcctggccaccaatgagctgggcagtgctgagagctcagtggacgtggcactggccacgcccggtgagggtggtgaggacacactggggcgcaggttccatggcaaagcggttgagggaaagggctgctatacggttgacaacgaggtgcagccatcagggccggaggacaatgtggtcatcatctacctcagccgtgctgggaaccctgaggctgcagtcgcagaaggggtccctgggcagctgcccccaggcctgctcctgctgggccaaagcctcctcctcttcttcttcctcacctccttctagccccacccagggcttccctaactcctccccttgcccctaccaatgcccctttaagtgctgcaggggtctggggttggcaactcctgaggcctgcatgggtgacttcacattttcctacctctccttctaatctcttctagagcacctgctatccccaacttctagacctgctccaaactagtgactaggatagaatttgatcccctaactcactgtctgcggtgctcattgctgctaacagcattgcctgtgctctcctctcaggggcagcatgctaacggggcgacgtcctaatccaactgggagaagcctcagtggtggaattccaggcactgtgactgtcaagctggcaagggccaggattgggggaatggagctggggcttagctgggaggtggtctgaagcagacagggaatgggagaggaggatgggaagtagacagtggctggtatggctctgaggctccctggggcctgctcaagctcctcctgctccttgctgttttctgatgatttgggggcttgggagtccctttgtcctcatctgagactgaaatgtggggatccaggatggcttccttcctcttacccttcctccctcagcctgcaacctctatcctggaacctgtcctccctttctccccaactatgcatctgttgtctgctcctctgcaaaggccagccagcttgggagcagcagagaaataaacagcatttctgatgcc

SEQ ID NO: 109 - DNA, 1685 bp, Homo sapiens
gagtagctgctttcggtccgccggacacaccggacagatagacgtgcggacggcccaccaccccagcccgccaactagtcagcctgcgcctggcgcctcccctctccaggtccatccgccatgtggcccctgtggcgcctcgtgtctctgctggccctgagccaggccctgccctttgagcagagaggcttctgggacttcaccctggacgatgggccattcatgatgaacgatgaggaagcttcgggcgctgacacctcaggcgtcctggacccggactctgtcacacccacctacagcgccatgtgtcctttcggctgccactgccacctgcgggtggttcagtgctccgacctgggtctgaagtctgtgcccaaagagatctcccctgacaccacgctgctggacctgcagaacaacgacatctccgagctccgcaaggatgacttcaagggtctccagcacctctacgccctcgtcctggtgaacaacaagatctccaagatccatgagaaggccttcagcccactgcggaagctgcagaagctctacatctccaagaaccacctggtggagatcccgcccaacctacccagctccctggtggagctccgcatccacgacaaccgcatccgcaaggtgcccaagggagtgttcagcgggctccggaacatgaactgcatcgagatgggcgggaacccactggagaacagtggctttgaacctggagccttcgatggcctgaagctcaactacctgcgcatctcagaggccaagctgactggcatccccaaagacctccctgagaccctgaatgaactccacctagaccacaacaaaatccaggccatcgaactggaggacctgcttcgctactccaagctgtacaggctgggcctaggccacaaccagatcaggatgatcgagaacgggagcctgagcttcctgcccaccctccgggagctccacttggacaacaacaagttggccagggtgccctcagggctcccagacctcaagctcctccaggtggtctatctgcactccaacaacatcaccaaagtgggtgtcaacgacttctgtcccatgggcttcggggtgaagcgggcctactacaacggcatcagcctcttcaacaaccccgtgccctactgggaggtgcagccggccactttccgctgcgtcactgaccgcctggccatccagtttggcaactacaaaaagtagaggcagctgcagccaccgcggggcctcagtgggggtctctggggaacacagccagacatcctgatggggaggcagagccaggaagctaagccagggcccagctgcgtccaacccagccccccacctcaggtccctgaccccagctcgatgccccatcaccgcctctccctggctcccaagggtgcaggtgggcgcaaggcccggcccccatcacatgttcccttggcctcagagctgcccctgctctcccaccacagccacccagaggcaccccatgaagcttttttctcgttcactcccaaacccaagtgtccaaagctccagtcctaggagaacagtccctgggtcagcagccaggaggcggtccataagaatggggacagtgggctctgccagggctgccgcacctgtccagaacaacatgttctgttcctcctcctcatgcatttccagccttg

SEQ ID NO: 110 - DNA, 1757 bp, Homo sapiens
caagcttggcacgagggcaggcattgcccgagccagccgagccgccagagccgcgggccgcgcgggtgtcgcgggcccaaccccaggatgctcccctgcgcctcctgcctacccgggtctctactgctctgggcgctgctactgttgctcttgggatcagcttctcctcaggattctgaagagcccgacagctacacggaatgcacagatggctatgagtgggacccagacagccagcactgccgggatgtcaacgagtgtctgaccatccctgaggcctgcaagggggaaatgaagtgcatcaaccactacgggggctacttgtgcctgccccgctccgctgccgtcatcaacgacctacacggcgagggacccccgccaccagtgcctcccgctcaacaccccaacccctgcccaccaggctatgagcccgacgatcaggacagctgtgtggatgtggacgagtgtgcccaggccctgcacgactgtcgccccagccaggactgccataacttgcctggctcctatcagtgcacctgccctgatggttaccgcaagatcgggcccgagtgtgtggacatagacgagtgccgctaccgctactgccagcaccgctgcgtgaacctgcctggctccttccgctgccagtgcgagccgggcttccagctggggcctaacaaccgctcctgtgttgatgtgaacgagtgtgacatgggggccccatgcgagcagcgctgcttcaactcctatgggaccttcctgtgtcgctgccaccagggctatgagctgcatcgggatggcttctcctgcagtgatattgatgagtgtagctactccagctacctctgtcagtaccgctgcgtcaacgagccaggccgtttctcctgccactgcccacagggttaccagctgctggccacacgcctctgccaagacattgatgagtgtgagtctggtgcgcaccagtgctccgaggcccaaacctgtgtcaacttccatgggggctaccgctgcgtggacaccaaccgctgcgtggagccctacatccaggtctctgagaaccgctgtctctgcccggcctccaaccctctatgtcgagagcagccttcatccattgtgcaccgctacatgaccatcacctcggagcggagagtacccgctgacgtgttccagatccaggcgacctccgtctaccccggtgcctacaatgcctttcagatccgtgctggaaactcgcagggggacttttacattaggcaaatcaacaacgtcagcgccatgctggtcctcgcccggccggtgacgggcccccgggagtacgtgctggacctggagatggtcaccatgaattccctcatgagctaccgggccagctctgtactgaggctcaccgtctttgtaggggcctacaccttctgaggagcaggagggagccaccctccctgcagctaccctagctgaggagcctgttgtgaggggcagaatgagaaaggcccaggggcccccattgacaggagctgggagctctgcaccacgagcttcagtcaccccgagaggagaggaggtaacgaggagggcggactccaggccccggcccagagatttggacttggctggcttgcaggggtcctaagaaactccactctggacagcgccaggaggccctgggttccattcctaactctgcctcaaactgtacatttggataagccctagtagttccctgggcctgtttttctataaaacgaggcaactgg

SEQ ID NO: 111 - DNA, 1362 bp, Homo sapiens
catttggggacgctctcagctctcggcgcacggcccagcttccttcaaaatgtctactgttcacgaaatcctgtgcaagctcagcttggagggtgatcactctacacccccaagtgcatatgggtctgtcaaagcctatactaactttgatgctgagcgggatgctttgaacattgaaacagccatcaagaccaaaggtgtggatgaggtcaccattgtcaacattttgaccaaccgcagcaatgcacagagacaggatattgccttcgcctaccagagaaggaccaaaaaggaacttgcatcagcactgaagtcagccttatctggccacctggagacggtgattttgggcctattgaagacacctgctcagtatgacgcttctgagctaaaagcttccatgaaggggctgggaaccgacgaggactctctcattgagatcatctgctccagaaccaaccaggagctgcaggaaattaacagagtctacaaggaaatgtacaagactgatctggagaaggacattatttcggacacatctggtgacttccgcaagctgatggttgccctggcaaagggtagaagagcagaggatggctctgtcattgattatgaactgattgaccaagatgctcgggatctctatgacgctggagtgaagaggaaaggaactgatgttcccaagtggatcagcatcatgaccgagcggagcgtgccccacctccagaaagtatttgataggtacaagagttacagcccttatgacatgttggaaagcatcaggaaagaggttaaaggagacctggaaaatgctttcctgaacctggttcagtgcattcagaacaagcccctgtattttgctgatcggctgtatgactccatgaagggcaaggggacgcgagataaggtcctgatcagaatcatggtctcccgcagtgaagtggacatgttgaaaattaggtctgaattcaagagaaagtacggcaagtccctgtactattatatccagcaagacactaagggcgactaccagaaagcgctgctgtacctgtgtggtggagatgactgaagcccgacacggcctgagcgtccagaaatggtgctcaccatgcttccagctaacaggtctagaaaaccagcttgcgaataacagtccccgtggccatccctgtgagggtgacgttagcattacccccaacctcattttagttgcctaagcattgcctggccttcctgtctagtctctcctgtaagccaaagaaatgaacattccaaggagttggaagtgaagtctatgatgtgaaacactttgcctcctgtgtactgtgtcataaacagatgaataaactgaatttgtacttt

SEQ ID NO: 112 - DNA, 3227 bp, Homo sapiens
gctgggcaaagccggtggcaagggcctcccctgccgctgtgccaggcaggcagtgccaaatccggggagcctggagctggggggagggccggggacagcccggccctgccccctcccccgctgggagcccagcaacttctgaggaaagtttggcacccatggcgtggcggtgccccaggatgggcagggtcccgctggcctggtgcttggcgctgtgcggctgggcgtgcatggcccccaggggcacgcaggctgaagaaagtcccttcgtgggcaacccagggaatatcacaggtgcccggggactcacgggcacccttcggtgtcagctccaggttcagggagagccccccgaggtacattggcttcgggatggacagatcctggagctcgcggacagcacccagacccaggtgcccctgggtgaggatgaacaggatgactggatagtggtcagccagctcagaatcacctccctgcagctttccgacacgggacagtaccagtgtttggtgtttctgggacatcagaccttcgtgtcccagcctggctatgttgggctggagggcttgccttacttcctggaggagcccgaagacaggactgtggccgccaacacccccttcaacctgagctgccaagctcagggacccccagagcccgtggacctactctggctccaggatgctgtccccctggccacggctccaggtcacggcccccagcgcagcctgcatgttccagggctgaacaagacatcctctttctcctgcgaagcccataacgccaagggggtcaccacatcccgcacagccaccatcacagtgctcccccagcagccccgtaacctccacctggtctcccgccaacccacggagctggaggtggcttggactccaggcctgagcggcatctaccccctgacccactgcaccctgcaggctgtgctgtcagacgatgggatgggcatccaggcgggagaaccagaccccccagaggagcccctcacctcgcaagcatccgtgcccccccatcagcttcggctaggcagcctccatcctcacaccccttatcacatccgcgtggcatgcaccagcagccagggcccctcatcctggacccactggcttcctgtggagacgccggagggagtgcccctgggcccccctaagaacattagtgctacgcggaatgggagccaggccttcgtgcattggcaagagccccgggcgcccctgcagggtaccctgttagggtaccggctggcgtatcaaggccaggacaccccagaggtgctaatggacatagggctaaggcaagaggtgaccctggagctgcagggggacgggtctgtgtccaatctgacagtgtgtgtggcagcctacactgctgctggggatggaccctggagcctcccagtacccctggaggcctggcgcccagtgaaggaaccttcaactcctgccttctcgtggccctggtggtatgtactgctaggagcagtcgtggccgctgcctgtgtcctcatcttggctctcttccttgtccaccggcgaaagaaggagacccgttatggagaagtgtttgaaccaacagtggaaagaggtgaactggtagtcaggtaccgcgtgcgcaagtcctacagtcgtcggaccactgaagctaccttgaacagcctgggcatcagtgaagagctgaaggagaagctgcgggatgtgatggtggaccggcacaaggtggccctggggaagactctgggagagggagagtttggagctgtgatggaaggccagctcaaccaggacgactccatcctcaaggtggctgtgaagacgatgaagattgccatctgcacgaggtcagagctggaggatttcctgagtgaagcggtctgcatgaaggaatttgaccatcccaacgtcatgaggctcatcggtgtctgtttccagggttctgaacgagagagcttcccagcacctgtggtcatcttacctttcatgaaacatggagacctacacagcttcctcctctattcccggctcggggaccagccagtgtacctgcccactcagatgctagtgaagttcatggcagacatcgccagtggcatggagtatctgagtaccaagagattcatacaccgggacctggcggccaggaactgcatgctgaatgagaacatgtccgtgtgtgtggcggacttcgggctctccaagaagatctacaatggggactactaccgccagggacgtatcgccaagatgccagtcaagtggattgccattgagagtctagctgaccgtgtctacaccagcaagagcgatgtgtggtccttcggggtgacaatgtgggagattgccacaagaggccaaaccccatatccgggcgtggagaacagcgagatttatgactatctgcgccagggaaatcgcctgaagcagcctgcggactgtctggatggactgtatgccttgatgtcgcggtgctgggagctaaatccccaggaccggccaagttttacagagctgcgggaagatttggagaacacactgaaggccttgcctcctgcccaggagcctgacgaaatcctctatgtcaacatggatgagggtggaggttatcctgaaccccctggagctgcaggaggagctgaccccccaacccagccagaccctaaggattcctgtagctgcctcactgcggctgaggtccatcctgctggacgctatgtcctctgcccttccacaacccctagccccgctcagcctgctgataggggctccccagcagccccagggcaggaggatggtgcctgagacaaccctccacctggtactccctctcaggatccaagctaagcactgccactggggaaaactccaccttcccacttttccaccccacgccttatccccacttgcagccctgtcttcctacctatcccacctccatcccagacaggtccctccccttctctgtgcagtagcatcaccttgaaagcagtagcatcaccatctgtaaaaggaaggggttggattgcaatatctgaagccctcccaggtgttaacattccaagactctagagtccaaggtttaaagagtctagattcaaaggttctaggtttcaaagatgctgtgagtctttggttctaaggacctgaaattccaaagtctctaattctattaaagtgctaaggttctaaggcaaaaaaaaaaaaaaaaaaaaa

SEQ ID NO: 113 - DNA, 4050 bp, Homo sapiens
cttgcaatccaggctttccttggaagtggctgtaacatgtatgaaaagaaagaaaggaggaccaagagatgaaagagggctgcacgcgtgggggcccgagtggtgggcggggacagtcgtcttgttacaggggtgctggccttccctggcgcctgcccctgtcggccccgcccgagaacctccctgcgccagggcagggtttactcatcccggcgaggtgatcccatgcgcgagggcgggcgcaagggcggccagagaacccagcaatccgagtatgcggcatcagcccttcccaccaggcacttccttccttttcccgaacgtccagggagggagggccgggcacttataaactcgagccctggccgatccgcatgtcagaggctgcctcgcaggggctgcgcgcacggcaagaagtgtctgggctgggacggacaggagaggctgtcgccatcggcgtcctgtgcccctctgctccggcacggccctgtcgcagtgcccgcgctttccccggcgcctgcacgcggcgcgcctgggtaacatgcttggggtcctggtccttggcgcgctggccctggccggcctggggttccccgcacccgcagagccgcagccgggtggcagccagtgcgtcgagcacgactgcttcgcgctctacccgggccccgcgaccttcctcaatgccagtcagatctgcgacggactgcggggccacctaatgacagtgcgctcctcggtggctgccgatgtcatttccttgctactgaacggcgacggcggcgttggccgccggcgcctctggatcggcctgcagctgccacccggctgcggcgaccccaagcgcctcgggcccctgcgcggcttccagtgggttacgggagacaacaacaccagctatagcaggtgggcacggctcgacctcaatggggctcccctctgcggcccgttgtgcgtcgctgtctccgctgctgaggccactgtgcccagcgagccgatctgggaggagcagcagtgcgaagtgaaggccgatggcttcctctgcgagttccacttcccagccacctgcaggccactggctgtggagcccggcgccgcggctgccgccgtctcgatcacctacggcaccccgttcgcggcccgcggagcggacttccaggcgctgccggtgggcagctccgccgcggtggctcccctcggcttacagctaatgtgcaccgcgccgcccggagcggtccaggggcactgggccagggaggcgccgggcgcttgggactgcagcgtggagaacggcggctgcgagcacgcgtgcaatgcgatccctggggctccccgctgccagtgcccagccggcgccgccctgcaggcagacgggcgctcctgcaccgcatccgcgacgcagtcctgcaacgacctctgcgagcacttctgcgttcccaaccccgaccagccgggctcctactcgtgcatgtgcgagaccggctaccggctggcggccgaccaacaccggtgcgaggacgtggatgactgcatactggagcccagtccgtgtccgcagcgctgtgtcaacacacagggtggcttcgagtgccactgctaccctaactacgacctggtggacggcgagtgtgtggagcccgtggacccgtgcttcagagccaactgcgagtaccagtgccagcccctgaaccaaactagctacctctgcgtctgcgccgagggcttcgcgcccattccccacgagccgcacaggtgccagatgttttgcaaccagactgcctgtccagccgactgcgaccccaacacccaggctagctgtgagtgccctgaaggctacatcctggacgacggtttcatctgcacggacatcgacgagtgcgaaaacggcggcttctgctccggggtgtgccacaacctccccggtaccttcgagtgcatctgcgggcccgactcggcccttgcccgccacattggcaccgactgtgactccggcaaggtggacggtggcgacagcggctctggcgagcccccgcccagcccgacgcccggctccaccttgactcctccggccgtggggctcgtgcattcgggcttgctcataggcatctccatcgcgagcctgtgcctggtggtggcgcttttggcgctcctctgccacctgcgcaagaagcagggcgccgccagggccaagatggagtacaagtgcgcggccccttccaaggaggtagtgctgcagcacgtgcggaccgagcggacgccgcagagactctgagcggcctccgtccaggagcctggctccgtccaggagctgtgcctcctcacccccagctttgctaccaaagcaccttagctggcattacagctggagaagaccctccccgcaccccccaagctgttttcttctattccatggctaactggcgagggggtgattagagggaggagaatgagcctcggcctcttccgtgacgtcactggaccactgggcaatgatggcaattttgtaacgaagacacagactgcgatttgtcccaggtcctcactaccgggcgcaggagggtgagcgttattggtcggcagccttctgggcagaccttgacctcgtgggctagggatgactaaaatatttattttttttaagtatttaggtttttgtttgtttcctttgttcttacctgtatgtctccagtatccactttgcacagctctccggtctctctctctctacaaactcccacttgtcatgtgacaggtaaactatcttggtgaatttttttttcctagccctctcacatttatgaagcaagccccacttattccccattcttcctagttttctcctcccaggaactgggccaactcacctgagtcaccctacctgtgcctgaccctacttcttttgctcatctagctgtctgctcagacagaacccctacatgaaacagaaacaaaaacactaaaaataaaaatggccatttgctttttcaccagatttgctaatttatcctgaaatttcagattcccagagcaaaataattttaaacaaagggttgagatgtaaaaggtattaaattgatgttgctggactgtcatagaaattacacccaaagaggtatttatctttacttttaaacagtgagcctgaattttgttgctgttttgatttgtactgaaaaatggtaattgttgctaatcttcttatgcaatttccttttttgttattattacttatttttgacagtgttgaaaatgttcagaaggttgctctagattgagagaagagacaaacacctcccaggagacagttcaagaaagcttcaaactgcatgattcatgccaattagcaattgactgtcactgttccttgtcactggtagaccaaaataaaaccagctctactggtcttgtggaattgggagcttgggaatggatcctggaggatgcccaattagggcctagccttaatcaggtcctcagagaatttctaccatttcagagaggccttttggaatgtggcccctgaacaagaattggaagctgccctgcccatgggagctggttagaaatgcagaatcctaggctccaccccatccagttcatgagaatctatatttaacaagatctgcagggggtgtgtctgctcagtaatttgaggacaaccattccagactgcttccaattttctggaatacatgaaatatagatcagttataagtagcaggccaagtcaggcccttattttcaagaaactgaggaattttctttgtgtagctttgctctttggtagaaaaggctaggtacacagctctagacactgccacacagggtctgcaaggtctttggttcagctaagctaggaatgaaatcctgcttcagtgtatggaaataaatgtatcatagaaatgtaacttttgtaagacaaaggttttcctcttctattttgtaaactcaaaatatttgtacatagttatttatttattggagataatctagaacacaggcaaaatccttgcttatgacatcacttgtacaaaataaacaaataacaatgtg

SEQ ID NO: 114 - DNA, 604 bp, Homo sapiens
ccacgcgtccgcgctgcgccacatcccaccggcccttacactgtggtgtccagcagcatccggcttcatggggggacttgaaccctgcagcaggctcctgctcctgcctctcctgctggctgtaagtggtctccgtcctgtccaggcccaggcccagagcgattgcagttgctctacggtgagcccgggcgtgctggcagggatcgtgatgggagacctggtgctgacagtgctcattgccctggccgtgtacttcctgggccggctggtccctcgggggcgaggggctgcggaggcagcgacccggaaacagcgtatcactgagaccgagtcgccttatcaggagctccagggtcagaggtcggatgtctacagcgacctcaacacacagaggccgtattacaaatgagcccgaatcatgacagtcagcaacatgatacctggatccagccattcctgaagcccaccctgcacctcattccaactcctaccgcgatacagacccacagagtgccatccctgagagaccagaccgctccccaatactctcctaaaataaacatgaagcacaaaaaaaaaaaaaaaaaaaaaaaaaaaaaaaaaa

SEQ ID NO: 115 - DNA, 983 bp, Homo sapiens
gtggaattcatggcatctacttcgtatgactattgcagagtgcccatggaagacggggataagcgctgtaagcttctgctggggataggaattctggtgctcctgatcatcgtgattctgggggtgcccttgattatcttcaccatcaaggccaacagcgaggcctgccgggacggccttcgggcagtgatggagtgtcgcaatgtcacccatctcctgcaacaagagctgaccgaggcccagaagggctttcaggatgtggaggcccaggccgccacctgcaaccacactgtgatggccctaatggcttccctggatgcagagaaggcccaaggacaaaagaaagtggaggagcttgagggagagatcactacattaaaccataagcttcaggacgcgtctgcagaggtggagcgactgagaagagaaaaccaggtcttaagcgtgagaatcgcggacaagaagtactaccccagctcccaggactccagctccgctgcggcgccccagctgctgattgtgctgctgggcctcagcgctctgctgcagtgagatcccaggaagctggcacatcttggaaggtccgtcctgctcggcttttcgcttgaacattcccttgatctcatcagttctgagcgggtcatggggcaacacggttagcggggagagcacggggtagccggagaagggcctctggagcaggtctggaggggccatggggcagtcctgggtgtggggacacagtcgggttgacccagggctgtctccctccagagcctccctccggacaatgagtcccccctcttgtctcccaccctgagattgggcatggggtgcggtgtggggggcatgtgctgcctgttgttatgggttttttttgcggggggggttgcttttttctggggtctttgagctccaaaaaataaacacttcctttgagggagagcaaaaaaaaaaaaaaaaaaaaaaaaaaaaaaaaaaaa

SEQ ID NO: 116 - DNA, 5641 bp, Homo sapiens
cggaggaggacgcgagccccttgcgggcggtcatcacagcccagcctcggggctgccacagcgcgttgcgcctgtgcgccctcggtccccgcgtccactgagcgccgcgctcggggatggggcccggccggccggcccccgcgccctggcctcgtcacctgctgcgctgcgtcctgctcctcgggtgcctgcacctcggccgtcccggcgcccctggggacgccgccctcccggaacccaacgtcttcctcatcttcagccatggactgcagggctgcctggaggcccagggcgggcaggtcagagtcaccccggcttgcaataccagcctccctgcccagcgctggaagtgggtctcccgaaaccggctattcaacctgggtaccatgcagtgcctgggcacaggctggccaggcaccaacaccacggcctccctgggcatgtatgagtgtgaccgggaagcactgaatcttcgctggcattgtcgtacactgggtgaccagctgtccttgctcctgggggcccgcaccagcaacatatccaagcctggcacccttgagcgtggtgaccagacccgcagtggccagtggcgcatctacggcagcgaggaggacctatgtgctctgccctaccacgaggtctacaccatccagggaaactcccacggaaagccgtgcaccatccccttcaaatatgacaaccagtggttccacggctgcaccagcacgggccgcgaggatggtcacctgtggtgtgccaccacccaggactacggcaaagacgagcgctggggcttctgccccatcaagagtaacgactgcgagaccttctgggacaaggaccagctgactgacagctgctaccagtttaacttccagtccacgctgtcgtggagggaggcctgggccagctgcgagcagcagggtgcggatctgctgagcatcacggagatccacgagcagacctacatcaacggcctcctcactgggtacagctccaccctgtggatcggcttgaatgacttggacacgagcggaggctggcagtggtcggacaactcgcccctcaagtacctcaactgggagagtgaccagccggacaaccccagtgaggagaactgtggagtgatccgcactgagtcctcgggcggctggcagaaccgtgactgcagcatcgcgctgccctatgtgtgcaagaagaagcccaacgccacggccgagcccacccctccagacaggtgggccaatgtgaaggtggagtgcgagccgagctggcagcccttccagggccactgctaccgcctgcaggccgagaagcgcagctggcaggagtccaagaaggcatgtctacggggcggtggcgacctggtcagcatccacagcatggcggagctggaattcatcaccaagcagatcaagcaagaggtggaggagctgtggatcggcctcaacgatttgaaactgcagatgaattttgagtggtctgacgggagccttgtgagcttcacccactggcacccctttgagcccaacaacttccgggacagtctggaggactgtgtcaccatctggggcccggaaggccgctggaacgacagtccctgtaaccagtccttgccatccatctgcaagaaggcaggccagctgagccagggggccgccgaggaggaccatggctgccggaagggttggacgtggcacagcccatcctgctactggctgggagaagaccaagtgacctacagtgaggcccggcgcctgtgcactgaccatggctctcagctggtcaccatcaccaacaggttcgagcaggccttcgtcagcagcctcatctacaactgggagggcgagtacttctggacggccctgcaggacctcaacagcaccggctccttcttctggctcagtggggatgaagtcatgtacacccactggaaccgggaccagcccgggtacagccgtgggggctgcgtggcgctggccactggcagcgccatggggctgtgggaggtgaagaactgtacctcgttccgggcccgctacatctgccggcagagcctgggcactccagtgacgccggagctgccggggccagatcccacgcccagcctcactggctcctgtccccagggctgggcctcggacaccaaactccggtattgctataaggtgttcagctcagagcggctgcaggacaagaagagctgggtccaggcccagggggcctgccaggagctgggggcccagctgctgagcctggccagctacgaggaggagcactttgtggccaacatgctcaacaagatcttcggtgaatcagaacccgagatccacgagcagcactggttctggatcggcctgaaccgtcgggatcccagagggggtcagagttggcgctggagcgacggcgtagggttctcttaccacaatttcgaccggagccggcacgacgacgacgacatccgaggctgtgcggtgctggacctggcctccctgcagtgggtggccatgcagtgcgacacacagctggactggatctgcaagatccccagaggtacggacgtgcgggagcccgacgacagccctcaaggccgacgggaatggctgcgcttccaggaggccgagtacaagttctttgagcaccactccacgtgggcgcaggcgcagcgcatctgcacgtggttccaggccgagctgacctccgtgcacagccaggcagagctagacttcctgagccacaacttgcagaagttctcccgggcccaggagcagcactggtggatcggcctgcacacctctgagagcgatgggcgcttcagatggacagatggttccattataaacttcatctcctgggcaccaggcaaacctcggcctgtcggcaaggacaagaagtgcgtgtacatgacagccagccgagaggactggggggaccagaggtgcctgacagccttgccctacatctgcaagcgcagcaacgtcaccaaagaaacgcagcccccagacctgccaactacagccctggggggctgcccctctgactggatccagttcctcaacaagtgttttcaggtccagggccaggaaccccagagccgggtgaagtggtcagaggcacagttctcctgtgaacagcaagaggcccagctggtcaccatcacaaaccccttagagcaagcattcatcacagccagcctgcccaatgtgacctttgacctttggattggcctccatgcctcgcagagggacttccagtgggtggagcaggagcctttgatgtatgccaactgggcacctggggagccctctggccctagccctgctcccagtggcaacaaaccgaccagctgtgcggtggtcctgcacagcccctcagcccacttcactggccgctgggacgatcggagctgcacggaggagacccatggcttcatctgccagaagggcacggacccctccctgagcccgtccccagcagcgctgccccccgccccgggcactgagctctcctacctcaacggcaccttccggctgcttcagaagccgctgcgctggcacgatgccctcctgctgtgtgagagccacaatgccagcctggcctacgtgcccgacccctacacccaggccttcctcacgcaggctgcccgagggctgcgcacgccgctctggattgggctggctggcgaggagggctctcggcggtactcctgggtctcagaggagccgctgaactacgtgggctggcaggacggggagccgcagcagccggggggctgtacctacgtagatgtggacggggcctggcgcaccaccagctgtgacaccaagctgcagggggctgtgtgtggggttagcagtgggccccctcctccccgaagaataagctaccatggcagctgtccccagggactggcagactccgcgtggattcccttccgggagcactgctattctttccacatggagctgctgctgggccacaaggaggcgcgacagcgctgccagagagcgggtggggccgtcctgtctatcctggatgagatggagaatgtgtttgtctgggagcacctgcagagctatgagggccagagtcggggcgcctggctgggcatgaacttcaaccccaaaggaggcactctggtctggcaggacaacacagctgtgaactactccaactgggggcccccgggcttgggccccagcatgctgagccacaacagctgctactggattcagagcaacagcgggctatggcgccccggcgcttgcaccaacatcaccatgggtgtcgtctgcaagcttcctcgtgctgagcagagcagcttctccccatcagcgcttccagagaacccagcggccctggtggtggtgctgatggcggtgctgctgctcctggccttgctgaccgcagccctcatcctttaccggaggcgccagagcatcgagcgcggggcctttgagggtgcccgctacagccgcagcagctccagccccaccgaggccactgagaagaacatcctggtgtcagacatggaaatgaatgagcaacaagaatagagccaggcgcgtgggcagggccagggcgggaggagctggggagctggggccctgggtcagtctggccccccaccagctgcctgtccagttggcctatggaagggtgcccttgggagtcgctgttgggagccggagctgggcagagcctgggctggtggggtgccaccctcccacaagggctgggctgagacccagctgagtgcagcgtggcgtttccctttctgggggggcctgaggtcttgtcacctggtcctgtgcccccacaggaaccagaggtaggatgggagggggaacgagagcctctttctccccagagcccccggcccaggcctgttgatccgcgccccaggacccccttctttgcagagcccgaggagcctcccctgtcccctcgggcagatctgttgtgtctctcttcccacctggcagcctcagctctgtgcccctcaccctgctccctctcgccccttctctcccaccccttccttctgagccgggccctggggattggggagccctcttgttcctgatgagggtcagctgagggggctgagcatccatcactcctgtgcctgctggggtggctgtggggcgtggcaggaggggcctaggtgggttgggcctgagaaccagggcacgggtgtggtgtctgctgggctggagataagactggggagagacaccccaacctcccagggtgggagctgggccgggctgggatgtcatctcctgccgggcgggggagggctctgcccctggaagagtcccctgtggggaccaaaataagttccctaacatctccagctcctggctctggtttggagcaaggggaagggttgccagagtcctgggggccccagaggagcaggagtctgggagggcccagagttcaccctctagtggatccaggaggagcagcacccgagccctggagtggcccagtacccttccaagaggccacagtcccagccaggacaaagtatgcggcccatcctggtgcgacagcgtgggacaatgtgaacatggactcgaagacatggccctttctctgtagttgattttttaaatgtgccattattgttttt

SEQ ID NO: 117 - DNA, 914 bp, Homo sapiens
ccagccaacgagcggaaaatggcagacaatttttcgctccatgatgcgttatctgggtctggaaacccaaaccctcaaggatggcctggcgcatgggggaaccagcctgctggggcagggggctacccaggggcttcctatcctggggcctaccccgggcaggcacccccaggggcttatcctggacaggcacctccaggcgcctaccatggagcacctggagcttatcccggagcacctgcacctggagtctacccagggccacccagcggccctggggcctacccatcttctggacagccaagtgcccccggagcctaccctgccactggcccctatggcgcccctgctgggccactgattgtgccttataacctgcctttgcctgggggagtggtgcctcgcatgctgataacaattctgggcacggtgaagcccaatgcaaacagaattgctttagatttccaaagagggaatgatgttgccttccactttaacccacgcttcaatgagaacaacaggagagtcattgtttgcaatacaaagctggataataactggggaagggaagaaagacagtcggttttcccatttgaaagtgggaaaccattcaaaatacaagtactggttgaacctgaccacttcaaggttgcagtgaatgatgctcacttgttgcagtacaatcatcgggttaaaaaactcaatgaaatcagcaaactgggaatttctggtgacatagacctcaccagtgcttcatataccatgatataatctgaaaggggcagattaaaaaaaaaaaaaaagaatctaaaccttacatgtgtaaaggtttcatgttcactgtgagtgaaaatttttacattcatcaatatccctcttgtaagtcatctacttaataaatattacagtgaaag

SEQ ID NO: 118 - DNA, 6754 bp, Homo sapiens
ccgggctgcgcggcgaggctgagccgggcccgggcgccggggccgggggcggctggcgcgggcaggaagcgcctcgcggacccgggcccgccccccgcctcccgccgcctccgggctcccggctcccggccgcgcctcgccccatgcactcgccgcgccgcgcagcccgcgcacgcccggatggctcctcgcgccgcgggcggcgcaccccttagcgcccgggccgccgccgccagccccccgccgttccagacgccgccgcggtgcccggtgccgctgctgttgctgctgctcctgggggcggcgcgggccggcgccctggagatccagcgtcggttcccctcgcccacgcccaccaacaacttcgccctggacggcgcggcggggaccgtgtacctggcggccgtcaaccgcctctatcagctgtcgggcgccaacctgagcctggaggccgaggcggccgtgggcccggtgcccgacagcccgctgtgtcacgctccgcagctgccgcaggcctcgtgcgagcacccgcggcgcctcacggacaactacaacaagatcctgcagctggaccccggccagggcctggtagtcgtgtgcgggtccatctaccagggcttctgccagctgcggcgccggggtaacatctcggccgtggccgtgcgcttcccgcccgccgcgccgcccgccgagcccgtcacggtgttccccagcatgctgaacgtggcggccaaccacccgaacgcgtccaccgtggggctagttctgcctcccgccgcgggcgcggggggcagccgcctgctcgtgggcgccacgtacaccggttacggcagctccttcttcccgcgcaaccgcagcctggaggaccaccgcttcgagaacacgcccgagatcgccatccgctccctggacacgcgcggcgacctggccaagctcttcaccttcgacctcaacccctccgacgacaacatcctcaagatcaagcagggcgccaaggagcagcacaagctgggcttcgtgagcgccttcctgcacccgtccgacccgccgccgggtgcacagtcctacgcgtacctggcgctcaacagcgaggcgcgcgcgggcgacaaggagagccaggcgcggagcctgctggcgcgcatctgcctgccccacggcgccggcggcgacgccaagaagctcaccgagtcctacatccagttgggcttgcagtgcgcgggcggcgcgggccgcggcgacctctacagccgcctggtgtcggtcttcccagcccgggagcggctctttgctgtcttcgagcggccccaggggtcccccgcggcccgcgctgctccggccgcactctgcgccttccgcttcgccgacgtgcgagccgccatccgagctgcgcgcaccgcctgcttcgtggaaccggcgcccgacgtggtggcggtgctcgacagcgtggtgcagggcacgggaccggcctgcgagcgcaagctcaacatccagctccagccagagcagctggactgtggagctgctcacctgcagcacccgctgtccatcctgcagcccctgaaggccacgcccgtgttccgcgccccgggcctcacctccgtggccgtggccagcgtcaacaactacacagcggtcttcctgggcacggtcaacgggaggcttctcaagatcaacctgaacgagagcatgcaggtggtgagcaggcgggtggtgactgtggcctatggggagcccgtgcaccatgtcatgcagtttgacccagcagactccgtttacctttacctgatgacgtcccaccagatggccagggtgaaggtcgccgcctgcaacgtgcactccacctgtggggactgcgtgggtgcggcggacgcctactgcggctggtgtgccctggagacgcggtgcaccttgcagcaggactgcaccaattccagccagcagcatttctggaccagtgccagcgagggccccagccgctgtcctgccatgaccgtcctgccttccgagatcgatgtgcgccaggagtacccaggcatgatcctgcagatctcgggcagcctgcccagcctcagtggcatggagatggcctgtgactatgggaacaacatccgcactgtggctcgggtcccaggccctgcctttggtcaccagattgcctactgcaacctcctgccgagggaccagtttccgcccttcccccccaaccaggaccacgtgactgttgagatgtctgtgagggtcaatgggcggaacatcgtcaaggccaatttcaccatctacgactgcagccgcactgcacaagtgtacccccacacagcctgtaccagctgcctgtcggcacagtggccctgtttctggtgcagccagcagcactcctgtgtttccaaccagtctcggtgcgaggcctcaccaaaccccacgagccctcaggactgcccccggaccctgctctcacccctggcacccgtgcctacgggtggctcccagaacatcctggtgcctctggccaacactgcctttttccagggtgcagccctggagtgtagttttgggctggaggagatcttcgaggctgtgtgggtgaatgagtctgttgtacgctgtgaccaggtggtgctgcacacgacccggaagagccaggtgttcccgctcagcctccaactaaaggggcggccagcccgattcctggacagccctgagcccatgacagtcatggtctataactgtgccatgggcagccccgactgttcccagtgcctgggccgcgaagacctgggtcacctgtgcatgtggagtgatggctgccgcctgcgggggcctctgcagcccatggctggcacctgccccgcccccgagatccgcgcgattgagcccctgagtggcccgttggacggtgggaccctgctgaccatccgaggaaggaacctgggccggcggctcagtgacgtggcccacggcgtgtggattggtggtgtggcctgtgagccactgcctgacagatacacggtgtcggaggagatcgtgtgtgtcacagggccagccccaggaccactctcaggtgtggtgaccgtgaacgcctctaaggagggcaagtcccgggaccgcttctcctacgtgctgcccctggtccactccctggagcctaccatgggccccaaggccgggggcaccaggatcaccatccatgggaatgacctccatgtaggctccgagctccaggtcctggtgaacgacacagacccctgcacggagctgatgcgcacagataccagcatcgcctgcaccatgcctgagggggccctgccggctccggtgcctgtgtgtgtgcgcttcgagcgtcggggctgcgtgcacggcaacctcaccttctggtacatgcagaacccggtcatcacggccatcagtccccgccgcagccctgtcagtggcggcaggaccatcacagtggctggtgagcgtttccacatggtgcagaatgtgtccatggccgtccaccacattggccgggagcccacgctctgcaaggttctcaactccaccctcatcacctgcccgtcccccggggccctgagcaacgcatcagcgccagtggacttcttcatcaatgggcgggcctacgcagacgaggtggctgtggctgaggagctactggaccccgaggaggcacagcggggcagcaggttccgcctggactacctccccaacccacagttctctacggccaagagggagaagtggatcaagcaccaccccggggagcctctcaccctcgttatccacaaggagcaggacagcctggggctccagagtcacgagtaccgggtcaagataggccaagtaagctgcgacatccagattgtctctgacagaatcatccactgctcggtcaacgagtccctgggcgcggccgtggggcagctgcccatcacaatccaggtagggaacttcaaccagaccatcgccacactgcagctggggggtagcgagacggccatcatcgtgtccatcgtcatctgcagcgtcctgctgctgctctccgtggtggccctgttcgtcttctgtaccaagagccgacgtgctgagcgttactggcagaagacgctgctgcagatggaggagatggaatctcagatccgagaggaaatccgcaaaggcttcgctgagctgcagacagacatgacagatctcaccaaggagctgaaccgcagccagggcatccccttcctggagtataagcacttcgtgacccgcaccttcttccccaagtgttcctccctttatgaagagcgttacgtgctgccctcccagaccctcaactcccagggcagctcccaggcacaggaaacccacccactgctgggagagtggaagattcctgagagctgccggcccaacatggaagagggaattagcttgttctcctcactactcaacaacaagcacttcctcatcgtctttgtccacgcgctggagcagcagaaggactttgcggtgcgcgacaggtgcagcctggcctcgctgctgaccatcgcgctgcacggcaagctggagtactacaccagcatcatgaaggagctgctggtggacctcattgacgcctcggccgccaagaaccccaagctcatgctgcggcgcacagagtctgtggtggagaagatgctcaccaactggatgtccatctgcatgtacagctgtctgcgggagacggtgggggagccattcttcctgctgctgtgtgccatcaagcagcaaatcaacaagggctccatcgacgccatcacaggcaaggcccgctacacactcaatgaggagtggctgctgcgggagaacatcgaggccaagccccggaacctgaacgtgtccttccagggctgtggcatggactcgctgagcgtgcgggccatggacaccgacacgctgacacaggtcaaggagaagatcctggaggccttctgcaagaatgtgccctactcccagtggccgcgtgcagaggacgtcgaccttgagtggttcgcctccagcacacagagctacatccttcgggacctggacgacacctcagtggtggaagacggccgcaagaagcttaacacgctggcccattacaagatccctgaaggtgcctccctggccatgagtctcatagacaagaaggacaacacactgggccgagtgaaagacttggacacagagaagtatttccatttggtgctgcctacggacgagctggcggagcccaagaagtctcaccggcagagccatcgcaagaaggtgctcccggaaatctacctgacccgcctgctctccaccaagggcacgttgcagaagtttctggatgacctgttcaaggccattctgagtatccgtgaagacaagcccccactggctgtcaagtactttttcgacttcctggaggagcaggctgagaagaggggaatctccgaccccgacaccctacacatctggaagaccaacagccttcctctccggttctgggtgaacatcctgaagaacccccagtttgtctttgacatcgacaagacagaccacatcgacgcctgcctttcagtcatcgcgcaggccttcatcgacgcctgctccatctctgacctgcagctgggcaaggattcgccaaccaacaagctcctctacgccaaggagattcctgagtaccggaagatcgtgcagcgctactacaagcagatccaggacatgacgccgctcagcgagcaagagatgaatgcccatctggccgaggagtcgaggaaataccagaatgagttcaacaccaatgtggccatggcagagatttataagtacgccaagaggtatcggccgcagatcatggccgcgctggaggccaaccccacggcccggaggacacaactgcagcacaagtttgagcaggtggtggctttgatggaggacaacatctacgagtgctacagtgaggcctgagacacatggagagttggtcaggctgctgctgggagaaatggacgcccactgggcctcaacttgatcttctaccccgtgcctgtgactcagactgggaaatactgagcagagacggctggggcgggggcaggaggaggggctgctctctgagacaggggcgcccccgccttgacccctgggcacctccatcccctcccacctgtccccagatcagtctctgggatggaggccagagagctggtcaggctcccccatctgcccagcacggcctgcactgtgcccacccacttgctccacaacgtccagttggtcctgctgccaagagccccgtgcatccaggcggccaagcacaaactgggggagaggaggccgccagcccggaggctgcagcccagaaactctacctcatccacactggtgcagggagccctccttgaactgacctttgattggtttctgcttcaactaccaaaatgttatctccacttccccctcacccgtagaggatcctggccacagacagtttcaagtagtgtcagatttttgttgcttgggcggctgttggtagagtgggcagtgcccgcgccatggggtgctctgtgggcttctccaggagcagggagggtggaggggagggatggggggcacaggagctgggagccccgtctccaggaaaaggagaggggttaagatgcaccgaggctgtagctgggctacttgatcttgctgaaagtgtttctaaagatagcaccacttttttttttaaagcttttatatattaaaaaacgtatcatgc

SEQ ID NO: 119 - DNA, 1638 bp, Homo sapiens
gccgcgggcggcggcggcagcggttggaggttgtaggaccggcgaggaataggaatcatggcggctgcgctgttcgtgctgctgggattcgcgctgctgggcacccacggagcctccggggctgccggcacagtcttcactaccgtagaagaccttggctccaagatactcctcacctgctccttgaatgacagcgccacagaggtcacagggcaccgctggctgaaggggggcgtggtgctgaaggaggacgcgctgcccggccagaaaacggagttcaaggtggactccgacgaccagtggggagagtactcctgcgtcttcctccccgagcccatgggcacggccaacatccagctccacgggcctcccagagtgaaggccgtgaagtcgtcagaacacatcaacgagggggagacggccatgctggtctgcaagtcagagtccgtgccacctgtcactgactgggcctggtacaagatcactgactctgaggacaaggccctcatgaacggctccgagagcaggttcttcgtgagttcctcgcagggccggtcagagctacacattgagaacctgaacatggaggccgaccccggccagtaccggtgcaacggcaccagctccaagggctccgaccaggccatcatcacgctccgcgtgcgcagccacctggccgccctctggcccttcctgggcatcgtggctgaggtgctggtgctggtcaccatcatcttcatctacgagaagcgccggaagcccgaggacgtcctggatgatgacgacgccggctctgcacccctgaagagcagcgggcagcaccagaatgacaaaggcaagaacgtccgccagaggaactcttcctgaggcaggtggcccgaggacgctccctgctccgcgtctgcgccgccgccggagtccactcccagtgcttgcaagattccaagttctcacctcttaaagaaaacccaccccgtagattcccatcatacacttccttcttttttaaaaaagttgggttttctccattcaggattctgttccttaggattttttccttctgaagtgtttcacgagagcccgggagctgctgccctgcggccccgtctgtggctttcagcctctgggtctgagtcatggccgggtgggcggcacagccttctccactggccggagtcagtgccaggtccttgccctttgtggaaagtcacaggtcacacgaggggccccgtgtcctgcctgtctgaagccaatgctgtctggttgcgccatttttgtgcttttatgtttaattttatgagggccacgggtctgtgttcgactcagcctcagggacgactctgacctcttggccacagaggactcacttgcccacaccgagggcgaccccgtcacagcctcaagtcactcccaagccccctccttgtctgtgcatccgggggcagctctggagggggtttgctggggaactggcgccatcgccgggactccagaaccgcagaagcctccccagctcacccctggaggacggccggctctctatagcaccagggctcacgtgggaacccccctcccacccaccgccacaataaagatcgcccccacctccaccctcaaaaaaaaaaaaaaaaaaaaaaa

SEQ ID NO: 120 - DNA, 1638 bp, Homo sapiens; identical to SEQ ID NO: 119

SEQ ID NO: 121 - DNA, 2757 bp, Homo sapiens
tctaaaggtcgggggcagcagcaagatgcgaagcgagccgtacagatcccgggctctccgaacgcaacttcgccctgcttgagcgaggctgcggtttccgaggccctctccagccaaggaaaagctacacaaaaagcctggatcactcatcgaaccacccctgaagccagtgaaggctctctcgcctcgccctctagcgttcgtctggagtagcgccaccccggcttcctggggacacagggttggcaccatggggcccaccagcgtcccgctggtcaaggcccaccgcagctcggtctctgactacgtcaactatgatatcatcgtccggcattacaactacacgggaaagctgaatatcagcgcggacaaggagaacagcattaaactgacctcggtggtgttcattctcatctgctgctttatcatcctggagaacatctttgtcttgctgaccatttggaaaaccaagaaattccaccgacccatgtactattttattggcaatctggccctctcagacctgttggcaggagtagcctacacagctaacctgctcttgtctggggccaccacctacaagctcactcccgcccagtggtttctgcgggaagggagtatgtttgtggccctgtcagcctccgtgttcagtctcctcgccatcgccattgagcgctatatcacaatgctgaaaatgaaactccacaacgggagcaataacttccgcctcttcctgctaatcagcgcctgctgggtcatctccctcatcctgggtggcctgcctatcatgggctggaactgcatcagtgcgctgtccagctgctccaccgtgctgccgctctaccacaagcactatatcctcttctgcaccacggtcttcactctgcttctgctctccatcgtcattctgtactgcagaatctactccttggtcaggactcggagccgccgcctgacgttccgcaagaacatttccaaggccagccgcagctctgagaatgtggcgctgctcaagaccgtaattatcgtcctgagcgtcttcatcgcctgctgggcaccgctcttcatcctgctcctgctggatgtgggctgcaaggtgaagacctgtgacatcctcttcagagcggagtacttcctggtgttagctgtgctcaactccggcaccaaccccatcatttacactctgaccaacaaggagatgcgtcgggccttcatccggatcatgtcctgctgcaagtgcccgagcggagactctgctggcaaattcaagcgacccatcatcgccggcatggaattcagccgcagcaaatcggacaattcctcccacccccagaaagacgaaggggacaacccagagaccattatgtcttctggaaacgtcaactcttcttcctagaactggaagctgtccacccaccggaagcgctctttacttggtcgctggccaccccagtgtttggaaaaaaatctctgggcttcgactgctgccagggaggagctgctgcaagccagagggaggaagggggagaatacgaacagcctggtggtgtcgggtgttggtgggtagagttagttcctgtgaacaatgcactgggaagggtggagatcaggtcccggcctggaatatatattctacccccctggagctttgattttgcactgagccaaaggtctagcattgtcaagctcctaaagggttcatttggcccctcctcaaagactaatgtccccatgtgaaagcgtctctttgtctggagctttgaggagatgttttccttcactttagtttcaaacccaagtgagtgtgtgcacttctgcttctttagggatgccctgtacatcccacaccccaccctcccttcccttcatacccctcctcaacgttcttttactttatactttaactacctgagagttatcagagctggggttgtggaatgatcgatcatctatagcaaataggctatgttgagtacgtaggctgtgggaagatgaagatggtttggaggtgtaaaacaatgtccttcgctgaggccaaagtttccatgtaagcgggatccgttttttggaatttggttgaagtcactttgatttctttaaaaaacatcttttcaatgaaatgtgttaccatttcatatccattgaagccgaaatctgcataaggaagcccactttatctaaatgatattagccaggatccttggtgtcctaggagaaacagacaagcaaaacaaagtgaaaaccgaatggattaacttttgcaaaccaagggagatttcttagcaaatgagtctaacaaatatgacatccgtctttcccacttttgttgatgtttatttcagaatcttgtgtgattcatttcaagcaacaacatgttgtattttgttgtgttaaaagtacttttcttgatttttgaatgtatttgtttcaggaagaagtcattttatggatttttctaacccgtgttaacttttctagaatccaccctcttgtgcccttaagcattactttaactggtagggaacgccagaacttttaagtccagctattcattagatagtaattgaagatatgtataaatattacaaagaataaaaatatattactgtctctttagtatggttttcagtgcaattaaaccgagagatgtcttgtttttttaaaaagaatagtatttaataggtttctgacttttgtggatcattttgcacatagctttatcaacttttaaacattaataaactgatttttttaaag

SEQ ID NO: 122 - DNA, 1958 bp, Homo sapiens
cggcacagcctcacacctgaacgctgtcctcccgcagacgagaccggcgggcactgcaaagctgggactcgtctttgaaggaaaaaaaatagcgagtaagaaatccagcaccattcttcactgacccatcccgctgcacctcttgtttcccaagtttttgaaagctggcaactctgacctcggtgtccaaaaatcgacagccactgagaccggctttgagaagccgaagatttggcagtttccagactgagcaggacaaggtgaaagcaggttggaggcgggtccaggacatctgagggctgaccctgggggctcgtgaggctgccaccgctgctgccgctacagacccagccttgcactccaaggctgcgcaccgccagccactatcatgtccactcccggggtcaattcgtccgcctccttgagccccgaccggctgaacagcccagtgaccatcccggcggtgatgttcatcttcggggtggtgggcaacctggtggccatcgtggtgctgtgcaagtcgcgcaaggagcagaaggagacgaccttctacacgctggtatgtgggctggctgtcaccgacctgttgggcactttgttggtgagcccggtgaccatcgccacgtacatgaagggccaatggcccgggggccagccgctgtgcgagtacagcaccttcattctgctcttcttcagcctgtccggcctcagcatcatctgcgccatgagtgtcgagcgctacctggccatcaaccatgcctatttctacagccactacgtggacaagcgattggcgggcctcacgctctttgcagtctatgcgtccaacgtgctcttttgcgcgctgcccaacatgggtctcggtagctcgcggctgcagtacccagacacctggtgcttcatcgactggaccaccaacgtgacggcgcacgccgcctactcctacatgtacgcgggcttcagctccttcctcattctcgccaccgtcctctgcaacgtgcttgtgtgcggcgcgctgctccgcatgcaccgccagttcatgcgccgcacctcgctgggcaccgagcagcaccacgcggccgcggccgcctcggttgcctcccggggccaccccgctgcctccccagccttgccgcgcctcagcgactttcggcgccgccggagcttccgccgcatcgcgggcgccgagatccagatggtcatcttactcattgccacctccctggtggtgctcatctgctccatcccgctcgtggtgcgagtattcgtcaaccagttatatcagccaagtttggagcgagaagtcagtaaaaatccagatttgcaggccatccgaattgcttctgtgaaccccatcctagacccctggatatatatcctcctgagaaagacagtgctcagtaaagcaatagagaagatcaaatgcctcttctgccgcattggcgggtcccgcagggagcgctccggacagcactgctcagacagtcaaaggacatcttctgccatgtcaggccactctcgctccttcatctcccgggagctgaaggagatcagcagtacatctcagaccctcctgccagacctctcactgccagacctcagtgaaaatggccttggaggcaggaatttgcttccaggtgtgcctggcatgggcctggcccaggaagacaccacctcactgaggactttgcgaatatcagagacctcagactcttcacagggtcaggactcagagagtgtcttactggtggatgaggctggtgggagcggcagggctgggcctgcccctaaggggagctccctgcaagtcacatttcccagtgaaacactgaacttatcagaaaaatgtatataataggcaaggaaagaaatacagtactgtttctggacccttataaaatcctgtgcaatagacacatacatgtcacatttagctgtgctcagaagggctatcatca

SEQ ID NO: 123 - DNA, 1576 bp, Homo sapiens
tcaccacctacaaccacagagctgtcatggctgccatctctacttccatccctgtaatttcacagccccagttcacagccatgaatgaaccacagtgcttctacaacgagtccattgccttcttttataaccgaagtggaaagcatcttgccacagaatggaacacagtcagcaagctggtgatgggacttggaatcactgtttgtatcttcatcatgttggccaacctattggtcatggtggcaatctatgtcaaccgccgcttccattttcctatttattacctaatggctaatctggctgctgcagacttctttgctgggttggcctacttctatctcatgttcaacacaggacccaatactcggagactgactgttagcacatggctcctgcgtcagggcctcattgacaccagcctgacggcatctgtggccaacttactggctattgcaatcgagaggcacattacggttttccgcatgcagctccacacacggatgagcaaccggcgggtagtggtggtcattgtggtcatctggactatggccatcgttatgggtgctatacccagtgtgggctggaactgtatctgtgatattgaaaattgttccaacatggcacccctctacagtgactcttacttagtcttctgggccattttcaacttggtgacctttgtggtaatggtggttctctatgctcacatctttggctatgttcgccagaggactatgagaatgtctcggcatagttctggaccccggcggaatcgggataccatgatgagtcttctgaagactgtggtcattgtgcttggggcctttatcatctgctggactcctggattggttttgttacttctagacgtgtgctgtccacagtgcgacgtgctggcctatgagaaattcttccttctccttgctgaattcaactctgccatgaaccccatcatttactcctaccgcgacaaagaaatgagcgccacctttaggcagatcctctgctgccagcgcagtgagaaccccaccggccccacagaaagctcagaccgctcggcttcctccctcaaccacaccatcttggctggagttcacagcaatgaccactctgtggtttagaacggaaactgagatgaggaaccagccgtcctctcttggaggataaacagcctccccctacccaattgccagggcaaggtggggtgtgagagaggagaaaagtcaactcatgtacttaaacactaaccaatgacagtatttgttcctggaccccacaagacttgatatatattgaaaattagcttatgtgacaaccctcatcttgatccccatcccttctgaaagtaggaagttggagctcttgcaatggaattcaagaacagactctggagtgtccatttagactacactaactagacttttaaaagattttgtgtggtttggtgcaagtcagaataaattctggctagttgaatccacaacttcatttatatacaggcttcccttttttatttttaaaggatacgtttcacttaataaacacgtttatgcctatcagcaaaaaaaaaaaaaaa

SEQ ID NO: 124 - DNA, 4350 bp, Homo sapiens
agttgagggattgacacaaatggtcaggcggcggcggcggagaaggaggcggaggcgcaggggggagccgagcccgctgggctgcggagagttgcgctctctacggggccgcggccactagcgcggcgccgccagccgggagccagcgagccgagggccaggaaggcgggacacgaccccggcgcgccctagccacccgggttctccccgccgcccgcgcttcatgaatcgcaagtttccgcggcggcggcggctgcggtacgcagaacaggagccgggggagcgggccgaaagcggcttgggctcgacggagggcacccgcgcagaggtctccctggccgcagggggagccgccgccggccgtgcccctggcagccccagcggagcggcgccaagagaggagccgagaaagtatggctgaggaggaggcgcctaagaagtcccgggccgccggcggtggcgcgagctgggaactttgtgccggggcgctctcggcccggctggcggaggagggcagcggggacgccggtggccgccgccgcccgccagttgacccccggcgattggcgcgccagctgctgctgctgctttggctgctggaggctccgctgctgctgggggtccgggcccaggcggcgggccaggggccaggccaggggcccgggccggggcagcaaccgccgccgccgcctcagcagcaacagagcgggcagcagtacaacggcgagcggggcatctccgtcccggaccacggctattgccagcccatctccatcccgctgtgcacggacatcgcgtacaaccagaccatcatgcccaacctgctgggccacacgaaccaggaggacgcgggcctggaggtgcaccagttctaccctctagtgaaagtgcagtgttccgctgagctcaagttcttcctgtgctccatgtacgcgcccgtgtgcaccgtgctagagcaggcgctgccgccctgccgctccctgtgcgagcgcgcgcgccagggctgcgaggcgctcatgaacaagttcggcttccagtggccagacacgctcaagtgtgagaagttcccggtgcacggcgccggcgagctgtgcgtgggccagaacacgtccgacaagggcaccccgacgccctcgctgcttccagagttctggaccagcaaccctcagcacggcggcggagggcaccgtggcggcttcccggggggcgccggcgcgtcggagcgaggcaagttctcctgcccgcgcgccctcaaggtgccctcctacctcaactaccacttcctgggggagaaggactgcggcgcaccttgtgagccgaccaaggtgtatgggctcatgtacttcgggcccgaggagctgcgcttctcgcgcacctggattggcatttggtcagtgctgtgctgcgcctccacgctcttcacggtgcttacgtacctggtggacatgcggcgcttcagctacccggagcggcccatcatcttcttgtccggctgttacacggccgtggccgtggcctacatcgccggcttcctcctggaagaccgagtggtgtgtaatgacaagttcgccgaggacggggcacgcactgtggcgcagggcaccaagaaggagggctgcaccatcctcttcatgatgctctacttcttcagcatggccagctccatctggtgggtgatcctgtcgctcacctggttcctggcggctggcatgaagtggggccacgaggccatcgaagccaactcacagtattttcacctggccgcctgggctgtgccggccatcaagaccatcaccatcctggcgctgggccaggtggacggcgatgtgctgagcggagtgtgcttcgtggggcttaacaacgtggacgcgctgcgtggcttcgtgctggcgcccctcttcgtgtacctgtttatcggcacgtcctttctgctggccggctttgtgtcgctcttccgcatccgcaccatcatgaagcacgatggcaccaagaccgagaagctggagaagctcatggtgcgcattggcgtcttcagcgtgctgtacactgtgccagccaccatcgtcatcgcctgctacttctacgagcaggccttccgggaccagtgggaacgcagctgggtggcccagagctgcaagagctacgctatcccctgccctcacctccaggcgggcggaggcgccccgccgcacccgcccatgagcccggacttcacggtcttcatgattaagtaccttatgacgctgatcgtgggcatcacgtcgggcttctggatctggtccggcaagaccctcaactcctggaggaagttctacacgaggctcaccaacagcaaacaaggggagactacagtctgagacccggggctcagcccatgcccaggcctcggccggggcgcagcgatcccccaaagccagcgccgtggagttcgtgccaatcctgacatctcgaggtttcctcactagacaactctctttcgcaggctcctttgaacaactcagctcctgcaaaagcttccgtccctgaggcaaaaggacacgagggcccgactgccagagggaggatggacagacctcttgccctcacactctggtaccaggactgttcgcttttatgattgtaaatagcctgtgtaagatttttgtaagtatatttgtatttaaatgacgaccgatcacgcgtttttctttttcaaaagtttttaattatttagggcggtttaaccatttgaggcttttccttcttgcccttttcggagtattgcaaaggagctaaaactggtgtgcaaccgcacagcgctcctggtcgtcctcgcgcgcctctccctaccacgggtgctcgggacggctgggcgccagctccggggcgagttcagcactgcggggtgcgactagggctgcgctgccagggtcacttcccgcctcctccttttgccccctccccctccttctgtcccctccctttctttcctggcttgaggtaggggctcttaaggtacagaactccacaaaccttccaaatctggaggagggcccccatacattacaattcctcccttgctcggcggtggattgcgaaggcccgtcccttcgacttcctgaagctggatttttaactgtccagaactttcctccaacttcatgggggcccacgggtgtgggcgctggcagtctcagcctccctccacggtcaccttcaacgcccagacactcccttctcccaccttagttggttacagggtgagtgagataaccaatgccaaactttttgaagtctaatttttgaggggtgagctcatttcattctctagtgtctaaaacctggtatgggtttggccagcgtcatggaaagatgtggttactgagatttgggaagaagcatgaagctttgtgtgggttggaagagactgaagatatgggttataaaatgttaattctaattgcatacggatgcctggcaaccttgcctttgagaatgagacagcctgcgcttagattttaccggtctgtaaaatggaaatgttgaggtcacctggaaagctttgttaaggagttgatgtttgctttccttaacaagacagcaaaacgtaaacagaaattgaaaacttgaaggatatttcagtgtcatggacttcctcaaaatgaagtgctattttcttatttttaatcaaataactagacatatatcagaaactttaaaatgtaaaagttgtacactttcaacattttattacgattattattcagcagcacattctgaggggggaacaattcacaccaccaataataacctggtaagatttcaggaggtaaagaaggtggaataattgacggggagatagcgcctgaaataaacaaaatatgggcatgcatgctaaagggaaaatgtgtgcaggtctactgcattaaatcctgtgtgctcctcttttggatttacagaaatgtgtcaaatgtaaatctttcaaagccatttaaaaatattcactttagttctctgtgaagaagaggagaaaagcaatcctcctgattgtattgttttaaactttaagaatttatcaaaatgccggtacttaggacctaaatttatctatgtctgtcatacgctaaaatgatattggtctttgaatttggtatacatttattctgttcactatcacaaaatcatctatatttatagaggaatagaagtttatatatatataataccatatttttaatttcacaaataaaaaattcaaagttttgtacaaaattatatggattttgtgcctgaaaataatagagcttgagctgtctgaactattttacattttatggtgtctcatagccaatcccacagtgtaaaaattca

SEQ ID NO: 125 - DNA, 4350 bp, Homo sapiens; identical to SEQ ID NO: 124

SEQ ID NO: 126 - DNA, 5057 bp, Homo sapiens
  modified_base (3995)..(3997): a, c, g, t, other or unknown
  modified_base (4906): a, c, g, t, other or unknown
  modified_base (4923): a, c, g, t, other or unknown
  modified_base (4932): a, c, g, t, other or unknown
  modified_base (4995): a, c, g, t, other or unknown
  modified_base (5028): a, c, g, t, other or unknown
  modified_base (5056): a, c, g, t, other or unknown
ggctcctgaggcgcacagcgccgagcgcggcgccgcgcacccgcgcgccggacgccagtgaccgcgatggtgaactccagtcgcgtgcagcctcagcagcccggggacgccaagcggccgcccgcgccccgcgcgccggacccgggccggctgatggctggctgcgcggccgtgggcgccagcctcgccgccccgggcggcctctgcgagcagcggggcctggagatcgagatgcagcgcatccggcaggcggccgcgcgggaccccccggccggagccgcggcctccccttctcctccgctctcgtcgtgctcccggcaggcgtggagccgcgataaccccggcttcgaggccgaggaggaggaggaggaggtggaaggggaagaaggcggaatggtggtggagatggacgtagagtggcgcccgggcagccggaggtcggccgcctcctcggccgtgagctccgtgggcgcgcggagccgggggcttgggggctaccacggcgcgggccacccgagcgggaggcggcgccggcgagaggaccagggcccgccgtgccccagcccagtcggcggcggggacccgctgcatcgccacctccccctggaagggcagccgccccgagtggcctgggcggagaggctggttcgcgggctgcgaggtctctggggaacaagactcatggaggaaagcagcactaaccgagagaaataccttaaaagtgttttacgggaactggtcacatacctcctttttctcatagtcttgtgcatcttgacctacggcatgatgagctccaatgtgtactactacacccggatgatgtcacagctcttcctagacacccccgtgtccaaaacggagaaaactaactttaaaactctgtcttccatggaagacttctggaagttcacagaaggctccttattggatgggctgtactggaagatgcagcccagcaaccagactgaagctgacaaccgaagtttcatcttctatgagaacctgctgttaggggttccacgaatacggcaactccgagtcagaaatggatcctgctctatcccccaggacttgagagatgaaattaaagagtgctatgatgtctactctgtcagtagtgaagatagggctccctttgggccccgaaatggaaccgcttggatctacacaagtgaaaaagacttgaatggtagtagccactggggaatcattgcaacttatagtggagctggctattatctggatttgtcaagaacaagagaggaaacagctgcacaagttgctagcctcaagaaaaatgtctggctggaccgaggaaccagggcaacttttattgacttctcagtgtacaacgccaacattaacctgttctgtgtggtcaggttattggttgaattcccagcaacaggtggtgtgattccatcttggcaatttcagcctttaaagctgatccgatatgtcacaacttttgatttcttcctggcagcctgtgagattatcttttgtttctttatcttttactatgtggtggaagagatattggaaattcgcattcacaaactacactatttcaggagtttctggaattgtctggatgttgtgatcgttgtgctgtcagtggtagctataggaattaacatatacagaacatcaaatgtggaggtgctactacagtttctggaagatcaaaatactttccccaactttgagcatctggcatattggcagatacagttcaacaatatagctgctgtcacagtattttttgtctggattaagctcttcaaattcatcaattttaacaggaccatgagccagctctcgacaaccatgtctcgatgtgccaaagacctgtttggctttgctattatgttcttcattattttcctagcgtatgctcagttggcataccttgtctttggcactcaggtcgatgacttcagtactttccaagagtgtatcttcactcaattccgtatcattttgggcgatatcaactttgcagagattgaggaagctaatcgagttttgggaccaatttatttcactacatttgtgttctttatgttcttcattcttttgaatatgtttttggctatcatcaatgatacttactctgaagtgaaatctgacttggcacagcagaaagctgaaatggaactctcagatcttatcagaaagggctaccataaagctttggtcaaactaaaactgaaaaaaaataccgtggatgacatttcagagagtctgcggcaaggaggaggcaagttaaactttgacgaacttcgacaagatctcaaagggaagggccatactgatgcagagattgaggcaatattcacaaagtacgaccaagatggagaccaagaactgaccgaacatgaacatcagcagatgagagacgacttggagaaagagagggaggacctggatttggatcacagttctttaccacgtcccatgagcagccgaagtttccctcgaagcctggatgactctgaggaggatgacgatgaagatagcggacatagctccagaaggaggggaagcatttctagtggcgtttcttacgaagagtttcaagtcctggtgagacgagtggaccggatggagcattccatcggcagcatagtgtccaagattgacgccgtgatcgtgaagctagagattatggagcgagccaaactgaagaggagggaggtgctgggaaggctgttggatggggtggccgaggatgaaaggctgggtcgtgacagtgaaatccatagggaacagatggaacggctagtacgtgaagagttggaacgctgggaatccgatgatgcagcttcccagatcagtcatggtttaggcacgccagtgggactaaatggtcaacctcgccccagaagctcccgcccatcttcctcccaatctacagaaggcatggaaggtgcaggtggaaatgggagttctaatgtccacgtatgatatgtgtgtttcagtatgtgtgtttctaataagtgaggaagtggctgtcctgaattgctgtaacaagcacactatttatatgccctgaccaccataggatgctagtctttgtgaccgattgctaatcttctgcactttaatttattttatataaactttacccatggttcaaagatttttttttctttttctcatataagaaatctaggtgtaaatattgagtacagaaaaaaaatcttcatgatgtgtattgagcggtacgcccagttgccaccatgactgagtcttctcagttgacaatgaagtagccttttaaagctagaaaactgtcaaagggcttctgagtttcatttccagtcacaaaaatcagtattgttatttttttccaagagtgtgaaggaaaatggggcaattcctttccactctggcatagttcatgagcttaatacatagctttcttttaagaaaggagccttttttttcaactagcttcctggggtaaacttttctaaaagataaaatgggaaggaactccaaactatgatagaatctgtgtgaatggttaagatgaatgttaaatactatgcttttttgtaagttgatcgtatctgatgtctgtgggactaactgtatcacttaatttttaccttattttggctctaatttgaataagctgagtaaaaccaccaaagatcagttataggataaaatggcatctctaaccataacacaggagaattggaaggagccctaagttgtcactcagtttaatttcttttaatggttagtttagcctaaagatttatctgcatattctttttcccatgtggctctactcatttgcaactgaatttaatgttataactcatctagtgagaccaacttactaaatttttagtatgcactgaaagtttttatccaacaattatgttcattttaagcaaaattttaagaaagttttgaaattcataaagcatttggttttaaactattttaagaatatagtactcggtcaggtatgnnncacgcctgtaatcccagcactttgggaggccgaaacaggcgaatcacttgagcccaggagttcaagaccaacatgggcaatgtggcgaaactccatctctacaaaaaatgcaaaaataaaaaatatagtactcaagtattcttgatcctgtgtttcaaaactagaatttgtaatgcaaatggagctcagtctaataaaaaagaggttttggtattaaaagttcatacattagacagtatcagccaaaatttgagttagcaacactgttttctttacgagagggtctcacccaaatttatggggagaaatctatttctcaaaaaaaaaaaatcttcttttacagaaatgttgagtaaggtgacattttgagcgctaataagcaaaagagcatgcagtgctgttgaataaccctcacttggagaaccaagagaatcctgtcgtttaatgctatattttaatttcacaagttgttcatttaactggtagaatgtcagtccaatctccaatgagaacatgagcaaatagacctttccaggttgaaagtgaaacatactgggtttctgtaagtttttcctcatggcttcatctctatctttactttctcttgaatatgctacacaaagttctttattactacatactaaagtttgcattccagggatattgactgtacatatttatgtatatgtaccatgttgttacatgtaaacaaacttcaatttgaagtgcagctattatgtggtatccatgtgtatcgaccatgtgccatatatcaattatggtcactagaaagtctctttatgatactttttattgtactgtttttcatttcacttgcaaaattttgcagaattcctcctttctacccataaattacatataatttttcttctttagtcatggagaacncccccccatcatctcanccctattanctttcccatgtgtactggtattattaaaaagacatttacatacgcaagtttttcactgacaancaagaatgttattaatgtgtaatactgagcacntttacttcttaataaaaacttgatatant

SEQ ID NO: 127 - DNA, 279 bp, Homo sapiens
atggcacctctccaccacatcttggttttctgtgtgggtctcctcaccatggccaaggcagaaagtccaaaggaacacgacccgttcacttacgactaccagtccctgcagatcggaggcctcgtcatcgccgggatcctcttcatcctgggcatcctcatcgtgctgagcagaagatgccggtgcaagttcaaccagcagcagaggactggggaacccgatgaagaggagggaactttccgcagctccatccgccgtctgtccacccgcaggcggtag

SEQ ID NO: 128 - DNA, 3935 bp, Homo sapiens
tccctcgctcaccccatcctctctcccgccccttcctggattccctcacccgtctcgatcccctctccgccctttcccagagacccagagcccctgaccccccgcgccctccccggagccccccgcgcgtgccgcggccatggcggccgtgcgcggggcgcccctgctcagctgcctcctggcgttgctggccctgtgccctggagggcgcccgcagacggtgctgaccgacgacgagatcgaggagttcctcgagggcttcctgtcagagctagaacctgagccccgggaggacgacgtggaggccccgccgcctcccgagcccaccccgcgggtccgaaaagcccaggcggggggcaagccagggaagcggccagggacggccgcagaagtgcctccggaaaagaccaaagacaaagggaagaaaggcaagaaagacaaaggccccaaggtgcccaaggagtccttggaggggtcccccaggccgcccaagaaggggaaggagaagccacccaaggccaccaagaagcccaaggagaagccacctaaggccaccaagaagcccaaggaggagccacccaaggccaccaagaagcccaaagagaagccacccaaggccaccaagaagcccccgtcagggaagaggccccccattctggctccctcagaaaccctggagtggccactgcccccaccccccagccctggccccgaggagctaccccaggagggaggggcgcccctctcaaataactggcagaatccaggagaggagacccatgtggaggcacaggagcaccagcctgagccggaggaggagaccgagcaacccacactggactacaatgaccagatcgagagggaggactatgaggactttgagtacattcggcgccagaagcaacccaggccacccccaagcagaaggaggaggcccgagcgggtctggccagagccccctgaggagaaggccccggccccagccccggaggagaggattgagcctcctgtgaagcctctgctgcccccgctgccccctgactatggtgatggttacgtgatccccaactacgatgacatggactattactttgggcctcctccgccccagaagcccgatgctgagcgccagacggacgaagagaaggaggagctgaagaaacccaaaaaggaggacagcagccccaaggaggagaccgacaagtgggcagtggagaagggcaaggaccacaaagagccccgaaagggcgaggagttggaggaggagtggacgcctacggagaaagtcaagtgtccccccattgggatggagtcacaccgtattgaggacaaccagatccgagcctcctccatgctgcgccacggcctgggggcacagcgcggccggctcaacatgcagaccggtgccactgaggacgactactatgatggtgcgtggtgtgccgaggacgatgccaggacccagtggatagaggtggacaccaggaggactacccggttcacaggcgtcatcacccagggcagagactccagcatccatgacgattttgtgaccaccttcttcgtgggcttcagcaatgacagccagacatgggtgatgtacaccaacggctatgaggaaatgacctttcatgggaacgtggacaaggacacacccgtgctgagtgagctcccagagccggtggtggctcgtttcatccgcatctacccactcacctggaatggcagcctgtgcatgcgcctggaggtgctggggtgctctgtggcccctgtctacagctactacgcacagaatgaggtggtggccaccgatgacctggatttccggcaccacagctacaaggacatgcgccagctcatgaaggtggtgaacgaggagtgccccaccatcacccgcacttacagcctgggcaagagctcacgaggcctcaagatctatgccatggagatctcagacaaccctggggagcatgaactgggggagcccgagttccgctacactgctgggatccatggcaacgaggtgctgggccgagagctgttgctgctgctcatgcagtacctgtgccgagagtaccgcgatgggaacccacgtgtgcgcagcctggtgcaggacacacgcatccacctggtgccctcactgaaccctgatggctacgaggtggcagcgcagatgggctcagagtttgggaactgggcgctgggactgtggactgaggagggctttgacatctttgaagatttcccggatctcaactctgtgctctggggagctgaggagaggaaatgggtcccctaccgggtccccaacaataacttgcccatccctgaacgctacctttcgccagatgccacggtatccacggaggtccgggccatcattgcctggatggagaagaaccccttcgtgctgggagcaaatctgaacggcggcgagcggctagtatcctacccctacgatatggcccgcacgcctacccaggagcagctgctggccgcagccatggcagcagcccggggggaggatgaggacgaggtctccgaggcccaggagactccagaccacgccatcttccggtggcttgccatctccttcgcctccgcacacctcaccttgaccgagccctaccgcggaggctgccaagcccaggactacaccggcggcatgggcatcgtcaacggggccaagtggaacccccggaccgggactatcaatgacttcagttacctgcataccaactgcctggagctctccttctacctgggctgtgacaagttccctcatgagagtgagctgccccgcgagtgggagaacaacaaggaggcgctgctcaccttcatggagcaggtgcaccgcggcattaagggggtggtgacggacgagcaaggcatccccattgccaacgccaccatctctgtgagtggcattaatcacggcgtgaagacagccagtggtggtgattactggcgaatcttgaacccgggtgagtaccgcgtgacagcccacgcggagggctacaccccgagcgccaagacctgcaatgttgactatgacatcggggccactcagtgcaacttcatcctggctcgctccaactggaagcgcatccgggagatcatggccatgaacgggaaccggcctatcccacacatagacccatcgcgccctatgaccccccaacagcgacgcctgcagcagcgacgcctacaacaccgcctgcggcttcgggcacagatgcggctgcggcgcctcaacgccaccaccaccctaggcccccacactgtgcctcccacgctgccccctgcccctgccaccaccctgagcactaccatagagccctggggcctcataccgccaaccaccgctggctgggaggagtcggagactgagacctacacagaggtggtgacagagtttgggaccgaggtggagcccgagtttgggaccaaggtggagcccgagtttgagacccagttggagcctgagttcgagacccagctggaacccgagtttgaggaagaggaggaggaggagaaagaggaggagatagccactggccaggcattccccttcacaacagtagagacctacacagtgaactttggggacttctgagatcagcgtcctaccaagaccccagcccaactcaagctacagcagcagcacttcccaagcctgctgaccacagtcacatcacccatcagcacatggaaggcccctggtatggacactgaaaggaagggctggtcctgcccctttgagggggtgcaaacatgactgggacctaagagccagaggctgtgtagaggctcctgctccacctgccagtctcgtaagagatggggttgctgcagtgttggagtaggggcagagggagggagccaaggtcactccaataaaacaagctcatggcaaaaaaaaaaaaaaaaaaaaa

SEQ ID NO: 129 - DNA, 1952 bp, Homo sapiens
tggggagctgctccggcttcggcgcggaggggcggcggccggggaggcggcggcggcggcaggattcccaggagccatgttgtcagaagtcctactggtgtctgctccggggaaagtcatccttcatggagaacatgccgtggtacatggcaaggtagcactggctgtatccttgaacttgagaacattcctccggcttcaaccccacagcaatgggaaagtggacctcagcttacccaacattggtatcaagcgggcctgggatgtggccaggcttcagtcactggacacaagctttctggagcaaggtgatgtcacaacacccacctcagagcaagtggagaagctaaaggaggttgcaggcttgcctgacgactgtgctgtcaccgagcgcctggctgtgctggcctttctttacttatacctgtccatctgccggaagcagagggccctgccgagcctggatatcgtagtgtggtcggagctgccccccggggcgggcttgggctccagcgccgcctactcggtgtgtctggcagcagccctcctgactgtgtgcgaggagatcccaaacccgctgaaggacggggattgcgtcaacaggtggaccaaggaggatttggagctaattaacaagtgggccttccaaggggagagaatgattcacgggaacccctccggagtggacaatgctgtcagcacctggggaggagccctccgataccatcaagggaagatttcatccttaaagaggtcgccagctctccagatcctgctgaccaacaccaaagtccctcgcaataccagggcccttgtggctggcgtcagaaacaggctgctcaagttcccagagatcgtggcccccctcctgacctcaatagatgccatctccctggagtgtgagcgcgtgctgggagagatgggggaagccccagccccggagcagtacctcgtgctggaagagctcattgacatgaaccagcaccatctgaatgccctcggcgtgggccacgcctctctggaccagctctgccaggtgaccagggcccgcggacttcacagcaagctgactggcgcaggcggtggtggctgtggcatcacactcctcaagccagggctggagcagccagaagtggaggccacgaagcaggccctgaccagctgtggctttgactgcttggaaaccagcatcggtgcccccggcgtctccatccactcagccacctccctggacagccgagtccagcaagccctggatggcctctgagaggagcccacgacactgcagccccacccagatgcccctttctggattattctgggggctgcagttcgactctgtgctggccagcgagcgcccagctcctgacactgctggagaggccccagccgcttggcgatgccagccaagctctgcagtcccagcggtgggacctagggaggcatggtctgccctctgcatcctctggagccagccgagcaggaggcctaggagggtcctctgagactccagacctgaggcgagaagggctgcttccctgaagctcccacagtcccatctgcttcaggcccccgccttggcctgtgttcttcctggccgcctgggtccaatgctcaggtgctggggcctggttcccggagaagtgtgccttctctctcccttttcagggacggccccctgtctctcagggccaggcctctccctcctccaggaagccttcccctaccccttgtcgcccctccctcccagagcacctgctgtctgggtggctcactcagcacttggcccttctacctagcgggatggggctcccccaggggctgtcccggaggcggtgggcctggttaaataaggcagtgtggccttggtttatatgcactttcttccgatctgtacctgagaggtttgtggaaaagatggcaaatggggaataaaaagattttgtgtcaac

SEQ ID NO: 130 - DNA, 937 bp, Homo sapiens
gttcttgcctggtgtcggtggttagtttctgcgacttgtgttgggactgctgataggaagatgtcttcaggaaatgctaaaattgggcaccctgcccccaacttcaaagccacagctgttatgccagatggtcagtttaaagatatcagcctgtctgactacaaaggaaaatatgttgtgttcttcttttaccctcttgacttcacctttgtgtgccccacggagatcattgctttcagtgatagggcagaagaatttaagaaactcaactgccaagtgattggtgcttctgtggattctcacttctgtcatctagcatgggtcaatacacctaagaaacaaggaggactgggacccatgaacattcctttggtatcagacccgaagcgcaccattgctcaggattatggggtcttaaaggctgatgaaggcatctcgttcaggggcctttttatcattgatgataagggtattcttcggcagatcactgtaaatgacctccctgttggccgctctgtggatgagactttgagactagttcaggccttccagttcactgacaaacatggggaagtgtgcccagctggctggaaacctggcagtgataccatcaagcctgatgtccaaaagagcaaagaatatttctccaagcagaagtgagcgctgggctgttttagtgccaggctgcggtgggcagccatgagaacaaaacctcttctgtattttttttttccattagtaaaacacaagacttcagattcagccgaattgtggtgtcttacaaggcaggcctttcctacagggggtggagagaccagcctttcttcctttggtaggaatggcctgagttggcgttgtgggcaggctactggtttgtatgatgtattagtagagcaacccattaatcttttgtagtttgtattaaacttgaactgag

SEQ ID NO: 131 - DNA, 1580 bp, Homo sapiens
ggcgacttcgtgcgctaccactacgtggggacgttccccgacggccagaagttcgactccagctatgacagagactccactttcaatgtgtttgtgggaaaaggacagctgatcacagggatggaccaggctcttgttgggatgtgcgtaaacgagagacgtttcgtgaagattcccccaaagcttgcctacggaaatgaaggagtttctggtgtgatcccccccaattcagtgcttcattttgatgtacttctgatggatatttggaattctgaagaccaggttcagattcacacctatttcaagcccccgagttgccctcggaccatccaggtgtctgattttgtgaggtaccactacaacgggacgttcctggacggaactctgtttgattcgagtcacaatcgcatgaaaacatatgacacgtatgtgggaattggctggctgattcctggaatggataaagggctgctggggatgtgtgtgggtgagaagcgcatcatcaccattcctccttttctggcctatggagaggatggagatgggaaagacattcccggtcaggcatctctggtgtttgatgttgcattattggacctccataaccccaaggacagcatttccattgagaacaaggtagtacctgaaaactgtgagcggataagtcaaagtggggactttctcaggtatcattacaatggcacgcttctggatggcaccctctttgattccagctactctcggaaccgcacgtttgacacgtacattgggcagggctacgtgattcctgggatggatgaaggtctacttggtgtttgcattggagaaaagcgaaggattgtggtcccgcctcacctggggtatggagaggaaggaagagggaatatccccggctcggctgtgctggtgtttgacatccatgtgatcgacttccacaacccttcggactccatcagcatcacctcccactacaaaccccctgactgctcagtgctgagtaagaagggagattacctcaaatatcactacaatgcctcacttctggatgggaccctgctggactccacgtggaatttaggcaaaacttacaatattgttctgggatctgggcaagttgtgttggggatggacatgggtctcagagagatgtgcgttggcgagaaacggacagtgatcattccgcctcacctgggctatggggaagctggcgtggatggagaagtgcccggcagtgccgtattagtgtttgacattgagctgctggagctggtggctggccttcctgaggggtacatgttcatatggaatggtgaggtgtcacccaacctctttgaagaaattgacaaggatggcaacggagaagtcctcctggaagagttctcagagtacattcacgcccaggtggcatctggcaaagggaaactcgctcctggctttgatgctgagctgattgtgaagaatatgttcaccaaccaggaccggaatggagatgggaaggtcacagccgaggaatttaaactcaaagaccaggaagccaaacacgatgaactctaaacctgggcatgaaccagatggtgcca

SEQ ID NO: 132 - DNA, 5749 bp, Homo sapiens
ctcccgcttctcctcctcctcctccacagttgcctgccctgggcgggggcgagcgcgtccggtttgctggaagcgttcggaaatggcaacttgcgcggtggaggtgttcgggctcctggaggacgaggaaaattcacgaattgtgagagtaagagttatagccggaataggccttgccaagaaggatatattgggagctagtgatccttacgtgagagtgacgttatatgacccaatgaatggagttcttacaagtgtgcaaacaaaaaccattaaaaagagtttgaatccaaagtggaatgaagaaatattattcagagttcatcctcagcagcaccggcttctttttgaagtgtttgacgaaaaccgattgacaagagatgatttcctaggtcaagtggatgttccactttatccattaccgacagaaaatccaagattggagagaccatatacatttaaggattttgttcttcatccaagaagtcacaaatcaagagttaaaggttatctgagactaaaaatgacttatttacctaaaaccagtggctcagaagatgataatgcagaacaggctgaggaattagagcctggctgggttgttttggaccaaccagatgctgcttgccatttgcagcaacaacaagaaccttctcctctacctccagggtgggaagagaggcaggatatccttggaaggacctattatgtaaaccatgaatctagaagaacacagtggaaaagaccaacccctcaggacaacctaacagatgctgagaatggcaacattcaactgcaagcacaacgtgcatttaccaccaggcggcagatatccgaggaaacagaaagtgttgacaaccaagagtcttccgagaactgggaaattataagagaagatgaagccaccatgtatagcagccaggccttcccatcacctccaccgtcaagtaacttggatgttccaactcatcttgcagaagaattgaatgccagactcaccatttttggaaattcagccgtgagccagccagcatcgagctcaaatcattccagcagaagaggcagcttacaagcctatacttttgaggaacaacctacacttcctgtgcttttgcctacttcatctggattaccaccaggttgggaagaaaaacaagatgaaagaggaagatcatattatgtagatcacaattccagaacgactacttggacaaagcccactgtacaggccacagtggagaccagtcagctgacctcaagccagagttctgcaggccctcaatcacaagcctccaccagtgattcaggccagcaggtgacccagccatctgaaattgagcaaggattccttcctaaaggctgggaagtccggcatgcaccaaatgggaggcctttctttattgaccacaacactaaaaccaccacctgggaagatccaagattgaaaattccagcccatctgagaggaaagacatcacttgatacttccaatgatctagggcctttacctccaggatgggaagagagaactcacacagatggaagaatcttctacataaatcacaatataaaaagaacacaatgggaagatcctcggttggagaatgtagcaataactggaccagcagtgccctactccagggattacaaaagaaagtatgagttcttccgaagaaagttgaagaagcagaatgacattccaaacaaatttgaaatgaaacttcgccgagcaactgttcttgaagactcttaccggagaattatgggtgtcaagagagcagacttcctgaaggctcgactgtggattgagtttgatggtgaaaagggattggattatggaggagttgccagagaatggttcttcctgatctcaaaggaaatgtttaacccttattatgggttgtttgaatattctgctacggacaattataccctacagataaatccaaactctggattgtgtaacgaagatcacctctcttacttcaagtttattggtcgggtagctggaatggcagtttatcatggcaaactgttggatggttttttcatccgcccattttacaagatgatgcttcacaaaccaataacccttcatgatatggaatctgtggatagtgaatattacaattccctaagatggattcttgaaaatgacccaacagaattggacctcaggtttatcatagatgaagaactttttggacagacacatcaacatgagctgaaaaatggtggatcagaaatagttgtcaccaataagaacaaaaaggaatatatttatcttgtaatacaatggcgatttgtaaaccgaatccagaagcaaatggctgcttttaaagagggattctttgaactaataccacaggatctcatcaaaatttttgatgaaaatgaactagagcttcttatgtgtggactgggagatgttgatgtgaatgactggagggaacatacaaagtataaaaatggctacagtgcaaatcatcaggttatacagtggttttggaaggctgttttaatgatggattcagaaaaaagaataagattacttcagtttgtcactggcacatctcgggtgcctatgaatggatttgctgaactatacggttcaaatggaccacagtcatttacagttgaacagtggggtacgcctgaaaagctgccaagagctcatacctgttttaatcgcctggacttgccaccttatgaatcatttgaagaattatgggataaacttcagatggcaattgaaaacacccagggctttgatggagttgattagattacaaataacaatctgtagtgtttttactgccatagttttataaccaaaatcttgacttaaaattttccggggaactactaaaatgtggccactgagtcttcccagatcttgaagaaaatcatataaaaagcatttgaagaaatagtacgacaacttatttttaatcacttttaaataatgtgttgcatttacacagttgtttcatgctgtctttagagttaggtgcctgcctaaagccaggcaccaccacacctggctttagagttcacacaataggatataagtcctgtatgacttaaatagtgaattttatccttaacatttacctcttgtatagtatctgccaggcagttttttcttaaactactgagatgataactgtgaaatatttgtgatacgtgtcatgtgtgaaaagtttgatgcattttgagatggaaaactgaaatttggaaaaagaaatactttactattgagtaaactacaatatatttagtgctactcgcagctatttattattttgtagacctgccttatgcaccttactgcctagatttttgggaaaaaactttggaaagtgtgttacctatatttctagccaactaactcacagaaaaactgtttacttcttcactttcgaagtatttggcttttgttaatatgcagttttactaaacagatggttcataagacatgtgaagcaaattcatatttgcaatgggtaaaaagtattaaagcctttctcttgcctgcatatcctattgaccattggtatagtcatcactttttcatattttagtgtagttagaagaattccttcttcaaacattaaagatccacaaagcagtatttctaaatatgccttgaagaactaaatgaagtgtatagcacttgcctttactagatattctttacacttgtacaattatgtagtaaatgtatgtttacagggtttatcatgtttacagattaagctaatttctgtagtcgcatttttatatttttagtatcactctagtaaaaaaaccaaataatttgtttaaaataaccaaagagttgttataatgcataatttgtattaaatttattactatttcttatgccttttaaaatactgtttactatgaagacaatgtttttaattacaaatccagaattctgtaggcaaaatgctacagttcatatcttcctttaaccaaactgaagtacataaagaccatgtacatgtattcatcaaacgtttattgaatgctgcgtgcctagcgctgtgctatgctctggggtaagagttgtcagcttcagagaagctgagtcctgatcctcaaggaacttgcaaatgtgtctatgaatttgtaaaacaatcaaaagtaggcgtaagcagaataaggcaaaagggaaagtgttctaggttccagcacacctgcaaagataaagtgtgccaagactgtatttatatttcatacttatattgtttcatccttatattggaatgattatatagaaaatgctcttaaaaagattaaacctatttctcagtatggtatcttggtgatttaggaataattgtaaatatatgttacgaatcttcttaaatatatatatatacacaccctgtgagaactgtaaaaagtacctctggttcttggtttaagtttgttggggtataacatgatgagtactcattagcacctgatagaaatctgaaatgtgacagtagcaaaaccactttctactttccaaacaccacagcatcagcatggtttaggggaagcaattcacagattaatgtaccctgcgttttgtcttcaccattgtcaaccagcagtcaaggatgagcaccaggtatagtcctggtttgatatctcaccagccatgtgaactgaagcagcttacttaacctctctggattcatatttcttcatctgtcaaatgagagtaatcatgcccaccctcattgtcatggcagattgtcagaagttccagacagatgagaaagcaaaaagtactttgtaaagtgttatacaatcagaaggtgctttgtgctgaccgtcagattgtgtcaagtcaggtgtgcaaattgaccacactcccaaagaatcatttaaaagtaaagtgacttctaagagacaaggaagtaggaacatttctgatattaaatatataaataatatggatacacatgtgtatatctgtatatggatcttaccatcataattcattttcttcatatcagcaaagtaatagtaatgtgggccaatgcattttggaaatgtcctcattatgtagaatggaatgtgaaaattatttttgttaaaacaggattttgccacaattatttaaatattatgtttgtgaactatctaagcatgagaaaatacaaagctttctttgtatctggctgatactcatttggatgattctgtgactcatagaacatgatgttaaatgagaccagactcaactgccaccagtccccagctgcagaccttcatccccttcatctcccactaggggctcgtggtctggaagaaacatgtatcaagcaacacagccccttatcccagatagaaaagtgtctcaaatgcattctactgcgggacagtcagtaggatcattttcataaagcaaggacatcatatgtttctagaaattacaagcatataactttagcctacaatctcttattaaaaatttttaacaaaattgtattacaaatgcatttcatcagaactcaaatttaaatggtgtttgttttgggtttttatttataatgctgaagttattccatataagtatcaagttaaacacaattcattttgattataaactatttgactttttaaaatcttctgacacagtaaatatatatatcaagattgatgtatcaaaatttattgcacactttaaagtgtaaaatcattttttaaaatcttgaatccacaaataaagttctattctgatttt

SEQ ID NO: 133 - DNA, 1725 bp, Homo sapiens
cgcctcttcacggcactgggatccgcatctgcctgggatcatcaagccctagaagctgggtttctttaaattagggctgccgttttctgtttctccctgggctgcggaaagccagaagattttatctagcttatacaaggctgctggtgttccctctttttttccacgagggtgtttttggctgcaattgcatgaaatcccaatggtgtagaccagtggcgatggatctaggagtttaccaactgagacatttttcaatttctttcttgtcatccttgctggggactgaaaacgcttctgtgagacttgataatagctcctctggtgcaagtgtggtagctattgacaacaaaatcgagcaagctatggatctagtgaaaagccatttgatgtatgcggtcagagaagaagtggaggtcctcaaagagcaaatcaaagaactaatagagaaaaattcccagctggagcaggagaacaatctgctgaagacactggccagtcctgagcagcttgcccagtttcaggcccagctgcagactggctccccccctgccaccacccagccacagggcaccacacagccccccgcccagccagcatcgcagggctcaggaccaaccgcatagctgcctatgcccccgcagaactggctgctgcgtgtgaactgaacagacggagaagatgtgctagggagaatctgcctccacagtcacccatttcattgctcgctgcgaaagagacgtgagactgacatatgccattatctcttttccagtattaaacactcatatgcttatggcttggagaaatttcttagttgggtgaattaaaggttaatccgagaattagcatggatataccgggacctcatgcagcttggcagatatctgagaaatggtttaattcatgctcaggagctgtgtgcctttccatcccttccggctccctacccctcacttccaagggttctctctcctgcttgcgcttagtgtcctacatggggttgtgaagcgatggagctcctcactggactcgcctctctcctctcctccccccaggaggaacttgaaaggagggtaaaaagactaaaatgagggggaacagagttcactgtacaaatttgacaactgtcaccaaaattcataaaaaacaatagtactgtgcctctttcttctcaaacaatggatgacacaaaactatgagagtgacaaaatggtgacaggtagctgggacctaggctatcttaccatgaaggttgttttgcttattgtatatttgtgtatgtagtgtaactattttgtacaatagaggactgtaactactatttaggttgtacagattgaaatttagttgtttcattggctgtctgaggaggtgtggacttttatatatagatctacataaaaactgctacatgacaaaaaccacacctaaaccccttttaagaatttggcacagttactcactttgtgtaatctgaaatctagctgctgaatacgctgaagtaaatccttgttcactgaagtctttcaattgagctggttgaatactttgaaaaatgctcagttctaactaatgaaatggatttcccagtaggggtttctgcatatcacctgtatagtagttatatgcatatgtttctgtgcatgttctctacacaattgtaaggtgtcactgtatttaactgttgcacttgtcaactttcaataaagcatataaatgttg

SEQ ID NO: 134 - DNA, 1110 bp, Homo sapiens
ccgccggcccccccggggccgctcgcgggcatggacagcgcggccgccgccttcgccctggacaagccggcgctgggcccggggccgccgccgcctccacccgcgctggggcccggcgactgcgcccaggcgcgcaagaacttctcggtgagccacctcctggacctggaagaggtggcggcggccgggcggctggcggcgcgccccggggccagggccgaggcgcgggagggcgcagcacgggagccgtccgggggcagcagcggcagcgaggcggcgccgcaggatggtgagtgtcccagcccggggcgcggtagcgccgccaagcggaagaagaagcagcggcggaaccgcaccacgttcaacagcagccaactgcaggcgctggagcgcgtgttcgagcgcacgcactaccccgacgcctttgtgcgcgaggagcttgcccggcgcgtcaacctcagcgaggcgcgcgttcaggtctggtttcagaaccgccgcgccaagttccgcaggaatgaaagggccatgctggccagccgctctgcctcgctgctcaagtcctacagccaggaggccgccatcgagcagcccgtggctccccggcccaccgccctgagtccagattatctctcctggacagcctcgtccccctacagcacagtgccaccctacagccctgggagctcaggccccgcaaccccaggggtcaacatggccaacagcatcgccagcctccgtctcaaggccaaggagttcagcctgcaccacagccaggtgcctacggtgaactgaagtccagtccccccaggacccagacgcctccctgggtggacagcaatagaaaagggggcagacgcccaggaagtgaccttctcctggatgagctctcctggcccgtctgtccagcctggactcccgagcccacgaggctgttgaggcccctgcagccgggcgcagctcttctgtccttggccaccagagactgcagcccacaacccttggaggggttgggccggaaggtggaagagcctgccaaggacctcatttagtttgtgtattaaaaccaaaaagcttttgtctttaagaaataaaaccatttttttaagcccc

SEQ ID NO: 135 - DNA, 926 bp, Homo sapiens
ggggcccattctgtttcagccagtcgccaagaatcatgaaagtcgccagtggcagcaccgccaccgccgccgcgggccccagctgcgcgctgaaggccggcaagacagcgagcggtgcgggcgaggtggtgcgctgtctgtctgagcagagcgtggccatctcgcgctgccggggcgccggggcgcgcctgcctgccctgctggacgagcagcaggtaaacgtgctgctctacgacatgaacggctgttactcacgcctcaaggagctggtgcccaccctgccccagaaccgcaaggtgagcaaggtggagattctccagcacgtcatcgactacatcagggaccttcagttggagctgaactcggaatccgaagttgggacccccgggggccgagggctgccggtccgggctccgctcagcaccctcaacggcgagatcagcgccctgacggccgaggcggcatgcgttcctgcggacgatcgcatcttgtgtcgctgaagcgcctcccccagggaccggcggaccccagccatccagggggcaagaggaattacgtgctctgtgggtctcccccaacgcgcctcgccggatctgagggagaacaagaccgatcggcggccactgcgcccttaactgcatccagcctggggctgaggctgaggcactggcgaggagagggcgctcctctctgcacacctactagtcaccagagactttagggggtgggattccactcgtgtgtttctattttttgaaaagcagacattttaaaaaatggtcacgtttggtgcttctcagatttctgaggaaattgctttgtattgtatattacaatgatcaccgactgagaatattgttttacaatagttctgtggggctgtttttttgttattaaacaaataatttagatggtgaaaaaaaaaa

SEQ ID NO: 136 - DNA, 2481 bp, Homo sapiens
agctttcttcttttccctgttgctcaaataaatagtgttctttgctcaaaccccctttccctcctccttctgcaatctcagcgcctagcgaaatctgttttcttcattgtaacctcagcttcaccgcaattaattttttttccctctggtcacaagataattcctgacgccagtgagtctggaggtcagacgaacagcaaattggggaacaaggcggcactaattccttacaagttccttgaaaaatctttcgcttaaaaaaaacggggggtggggggagcttctttgctgttcagggatttatgcctcgcggagctgtggctcgaaccagtgttggctaaggcggactggcaggggcagggaagctcaaagatctggggtgctgccaggaaaaagcaaattctggaagttaatggttttgagtgatttttaaatccttgctggcggagaggcccgcctctccccggtatcagcgcttcctcattctttgaatccgcggctccgcggtcttcggcgtcagaccagccggaggaagcctgtttgcaatttaagcgggctgtgaacgcccagggccggcgggggcagggccgaggcgggccattttgaataaagaggcgtgccttccaggcaggctctataagtgaccgccgcggcgagcgtgcgcgcgttgcaggtcactgtagcggacttcttttggttttctttctctttggggcacctctggactcactccccagcatgaaggcgctgagcccggtgcgcggctgctacgaggcggtgtgctgcctgtcggaacgcagtctggccatcgcccggggccgagggaagggcccggcagctgaggagccgctgagcttgctggacgacatgaaccactgctactcccgcctgcgggaactggtacccggagtcccgagaggcactcagcttagccaggtggaaatcctacagcgcgtcatcgactacattctcgacctgcaggtagtcctggccgagccagcccctggaccccctgatggcccccaccttcccatccaggtaagcctcgaagtcgggacagggctgaacacccaggcaaggatgctgcgggaccctcggagctcccgattgcctcgcgtaactcttccctcttttcctctaatcagacagccgagctcgctccggaacttgtcatctccaacgacaaaaggagcttttgccactgactcggccgtgtcctgacacctccaggtgagtatctcctctcttggagagggaggtttaaacggcaagtcctggagttggcagacgttttgaaaaattgccactcactcggtttagggaaactgaggccagagagggacaagtgacttgcccatggttgcatcaaatgaatggcagagtcagtttccatgtgatgtgcatttaagccttaatgcgcctggccctgcctccgcagtggccgaggtctggcaagtagacatggtccgactaaatacaagtctttctgttccatgttgtataggagctgtcttcggcagccccctcccagctagtgtcaattccaagtaggaggggtagcgcaacgtccgcctgtggtctttggcgccaactgggtgggggcagcgtggggggcggagttatcaggctggaggtacagaccaagtttcctccctggcgccggccagtctgcggacggcccccgcctcggcacgctcggcggaaactgactgctccttggtcttctttcctcccccgcccagaacgcaggtgctggcgcccgttctgcctgggaccccgggaacctctcctgccggaagccggacggcagggatgggccccaacttcgccctgcccacttgacttcaccaaatcccttcctggagactaaacctggtgctcaggagcgaaggactgtgaacttgtggcctgaagagccagagctagctctggccaccagctgggcgacgtcaccctgctcccaccccacccccaagttctaaggtcttttcagagcgtggaggtgtggaaggagtggctgctctccaaactatgccaaggcggcggcagagctggtcttctggtctccttggagaaaggttctgttgccctgatttatgaactctataatagagtatataggttttgtaccttttttacaggaaggtgactttctgtaacaatgcgatgtatattaaactttttataaaagttaacattttgcataataaacgatttttaaacacttgtgtatatgatgacacccgtctccattaagtactaatgatgctttctcgcacatggccgaattttgggagctttgggaaagtgaacttgcttattctacgagagggaaatgaaaaactgcctggttgagaggggatggggtggagagagaagggttcatgatgggagtctcatgtccattgagggatgggtgcagagaaaagttctggctctgcctcattatttcagagatgaaaccagagactggtgcaagct

SEQ ID NO: 137 - DNA, 640 bp, Homo sapiens
attctgagccgagcccggtgccaagcgcagctagctcagcaggcggcagcggcggcctgagcttcagggcagccagctcctcccggtctcgccttcctcgcggtcagcatgaaagccttcagtcccgtgaggtccgttaggaaaaacagcctgtcggaccacagcctgggcatctcccggagcaaaacccctgtggacgacccgatgagcctgctatacaacatgaacgactgctactccaagctcaaggagctggtgcccagcatcccccagaacaagaaggtgagcaagatggaaatcctgcagcacctcatcgactacatcttggacctgcagatcgccctggactcgcatcccactattgtcagcctgcatcaccagagacccgggcagaaccagcgctccaggacgccgctgaccaccctcaacacggatatcagcatcctgtccttgcaggcttctgaattcccttctgagttaatgtcaaatgacagcaaagcactgtgtggctgaataagcggtgttcatgatttcttttattctttgcacaacaacaacaacaacaaattcacggaatcttttaagtgctgaacttatttttcaaccatttcacaaggaggacaagttgaatggacctttt

SEQ ID NO: 138 - DNA, 1389 bp, Homo sapiens
atgtcaatagcaggagttgctgctcaggagatcagagtcccattaaaaactggatttctacataatggccgagccatggggaatatgaggaagacctactggagcagtcgcagtgagtttaaaaacaactttttaaatattgacccgataaccatggcctacagtctgaactcttctgctcaggagcgcctaataccacttgggcatgcttccaaatctgctccgatgaatggccactgctttgcagaaaatggtccatctcaaaagtccagcttgccccctcttcttattcccccaagtgaaaacttgggaccacatgaagaggatcaagttgtatgtggttttaagaaactcacagtgaatggggtttgtgcttccacccctccactgacacccataaaaaactccccttcccttttcccctgtgcccctctttgtgaacggggttctaggcctcttccaccgttgccaatctctgaagccctctctctggatgacacagactgtgaggtggaattcctaactagctcagatacagacttccttttagaagactctacactttctgatttcaaatatgatgttcctggcaggcgaagcttccgtgggtgtggacaaatcaactatgcatattttgataccccagctgtttctgcagcagatctcagctatgtgtctgaccaaaatggaggtgtcccagatccaaatcctcctccacctcagacccaccgaagattaagaaggtctcattcgggaccagctggctcctttaacaagccagccataaggatatccaactgttgtatacacagagcttctcctaactccgatgaagacaaacctgaggttccccccagagttcccatacctcctagaccagtaaagccagattatagaagatggtcagcagaagttacttcgagcacctatagtgatgaagacaggcctcccaaagtaccgccaagagaacctttgtcaccgagtaactcgcgcacaccgagtcccaaaagccttccgtcttacctcaatggggtcatgcccccgacacagagctttgcccctgatcccaagtatgtcagcagcaaagcactgcaaagacagaacagcgaaggatctgccagtaaggttccttgcattctgcccattattgaaaatgggaagaaggttagttcaacacattattacctactacctgaacgaccaccatacctggacaaatatgaaaaattttttagggaagcagaagaaacaaatggaggcgcccaaatccagccattacctgctgactgcggtatatcttcagccacagaaaagccagactcaaaaacaaaaatggatctgggtggccacgtgaagcgtaaacatttatcctatgtggtttctccttag

SEQ ID NO: 139 - DNA, 2464 bp, Homo sapiens
cggaaacttgggggagtgcacagaagaacttcgggagcgcacgcgggaccagggaccaggctgagactcggggcgccagtccgggcaggggcagcgggacgcggccggagatgccctgtatccaagcccaatatgggacaccagcaccgagtccgggaccccgtgaccacctggcaagcgaccccctgacccctgagttcatcaagcccaccatggacctggccagccccgaggcagcccccgctgcccccactgccctgcccagcttcagcacgttcatggacggctacacaggagagtttgacaccttcctctaccagctgccaggaacagtccagccatgctcctcagcctcctcctcggcctcctccacatcctcgtcctcagccacctcccctgcctctgcctccttcaagttcgaggacttccaggtgtacggctgctaccccggccccctgagcggcccagtggatgaggccctgtcctccagtggctctgactactatggcagcccctgctcggccccgtcgccctccacgcccagcttccagccgccccagctctctccctgggatggctccttcggccacttctcgcccagccagacttacgaaggcctgcgggcatggacagagcagctgcccaaagcctctgggcccccacagcctccagccttcttttccttcagtcctcccactggccccagccccagcctggcccagagccccctgaagttgttcccctcacaggccacccaccagctgggggagggagagagctattccatgcctacggccttcccaggtttggcacccacttctccacaccttgagggctcggggatactggatacacccgtgacctcaaccaaggcccggagcggggccccaggtccaagtgaaggccgctgtgctgtgtgtggggacaacgcttcatgccagcattatggtgtccgcacatgtgagggctgcaagggcttcttcaagcgcacagtgcagaaaaacgccaagtacatctgcctggctaacaaggactgccctgtggacaagaggcggcgaaaccgctgccagttctgccgcttccagaagtgcctggcggtgggcatggtgaaggaagttgtccgaacagacagcctgaaggggcggcggggccggctaccttcaaaacccaagcagcccccagatgcctcccctgccaatctcctcacttccctggtccttgcacacctggattcagggcccagcactgccaaactggactactccaagttccaggagctggtgctgccccactttgggaaggaagatgctggggatgtacagcagttctacgacctgctctccggttctctggaggtcatccgaaagtgggcggagaagatccctggctttgctgagctgtcaccggctgaccaggacctgttgctggagtcggccttcctggagctcttcatcctccgcctggcgtacaggtctaagccaggcgagggcaagctcatcttctgctcaggcctggtgctacaccggctgcagtgtgcccgtggcttcggggactggattgacagtatcctggccttctcaaggtccctgcacagcttgcttgtcgatgtccctgccttcgcctgcctctctgcccttgtcctcatcaccgaccggcatgggctgcaggagccgcggcgggtggaggagctgcagaaccgcatcgccagctgcctgaaggagcacgtggcagctgtggcgggcgagccccagccagccagctgcctgtcacgtctgttgggcaaactgcccgagctgcggaccctgtgcacccagggcctgcagcgcatcttctacctcaagctggaggacttggtgccccctccacccatcattgacaagatcttcatggacacgctgcccttctgacccctgcctgggaacacgtgtgcacatgcgcactctcatatgccaccccatgtgcctttagtccacggacccccagagcacccccaagcctgggcttgagctgcagaatgactccaccttctcacctgctccaggaggtttgcagggagctcaagcccttggggagggggatgccttcatgggggtgaccccacgatttgtcttatcccccccagcctggccccggcctttatgttttttgtaagataaaccgtttttaacacatagcgccgtgctgtaaataagcccagtgctgctgtaaatacaggaagaaagagcttgaggtgggagcggggctgggaggaagggatgggccccgccttcctgggcagcctttccagcctcctgcctggctctctcttcctaccctccttccacatgtacataaactgtcactctaggaagaagacaaatgacagattctgacatttatatttgtgtattttcctggatttatagtatgtgacttttctgattaatatatttaatatattgaataaaaaatagacatgtagttg

SEQ ID NO: 140 - DNA, 2135 bp, Homo sapiens
ggcacgagggtaaggccgttttcttttcccattcgctcatctgccaggaaaagggacttgccgttggcgcttcggcctcttgttcattgagaaaaaagaggaaatactccgcgtgcgcttgtagaaggggagtcgtctccagctccgaaccccggagtgttcatcagcggggaatctggctccgaattctctttttttctcccgccgattgctcggaagttggtctaaagcagaggttggaaagaaaggaaaaaagtttgcatcgagactggatttatttgcacatcgcagaaagaagagaatccaagggagaggggttggtgcaaagccgcgatcacggagttcagatgtgttctaagcctgctggagtgaccacacttccaagacctgatggaggccagagctcagagtggcaacgggtcgcagcccttgctgcagacgccccgtgacggtggcagacagcgtggggagcccgaccccagagacgccctcacccagcaggtacatgtcttgtctctggatcagatcagagccatccgaaacaccaatgagtacacagaggggcctactgtcgtcccaagacctgggctcaagcctgctcctcgcccctccactcagcacaaacacgagagactccacggtctgcctgagcaccgccagcctcctaggctccagcactcgcaggtccattcttctgcacgagcccctctgtccagatccataagcacggtcagctcagggtcgcggagcagtacgaggacaagtaccagcagcagctcctctgaacagagactgctaggatcatccttctcctccgggcctgttgctgatggcataatccgggtgcaacccaaatctgagctcaagccaggtgagcttaagccactgagcaaggaagatttgggcctgcacgcctacaggtgtgaggactgtggcaagtgcaaatgtaaggagtgcacctacccaaggcctctgccatcagactggatctgcgacaagcagtgcctttgctcggcccagaacgtgattgactatgggacttgtgtatgctgtgtgaaaggtctcttctatcactgttctaatgatgatgaggacaactgtgctgacaacccatgttcttgcagccagtctcactgttgtacacgatggtcagccatgggtgtcatgtccctctttttgccttgtttatggtgttaccttccagccaagggttgccttaaattgtgccaggggtgttatgaccgggttaacaggcctggttgccgctgtaaaaactcaaacacagtttgctgcaaagttcccactgtcccccctaggaactttgaaaaaccaacatagcatcattaatcaggaatattacagtaatgaggattttttctttctttttttaatacacatatgcaaccaactaaacagttataatcttggcactgttaatcgaaagttgggatagtctttgctgtttgcggtgaaatgctttttgtccatgtgccgttttaactgatatgcttgttagaactcagctaatggagctcaaagtatgagatacagaacttggtgacccatgtattgcataagctaaagcaacacagacactcctaggcaaagtttttgtttgtgaatagtacttgcaaaacttgtaaattagcagatgacttttttccattgttttctccagagagaatgtgctatatttttgtatatacaataatatttgcaactgtgaaaaacaagttgtgccatactacatggcacagacacaaaatattatactaatatgttgtacattcggaagaatgtgaatcaatcagtatgtttttagattgtattttgccttacagaaagcctttattgtaagactctgatttccctttggacttcatgtatattgtacagttacagtaaaattcaacctttattttctaattttttcaacatattgtttagtgtaaagaatatttatttgaagttttattattttataaaaaagaatatttattttaagaggcatcttacaaattttgccccttttatgaggatgtgatagttgctgcaaatgaggggttacagatgcatatgtccaatataaaatagaaaatatattaacgtttgaaattaaaaaaaaaaaaaaaaaa

SEQ ID NO: 141 - DNA, 2187 bp, Homo sapiens
agcccgggcggcgggctagggcgctcgcagggcttctgggccgaccccgctccggcgcctccgcttcccgcccggggcccgccctcgcggcccggcctcgctcccgggtcccagatgaccaccgagggcgggccgccgccggccccgctccgccgcgcgtgcagcccggtccccggcgcgctccaggccgccctgatgagcccgccgcccgccgccgccgccgccgccgccgccgccccggagaccacctcctcctcctcgtcgtcgtcctccgcctcctgcgcctcgtcctcgtcctcctccaattcggccagcgccccctcggctgcctgcaagagcgcgggcggcggcggcgcgggcgccgggagcgggggcgccaagaaggcgagctcggggctgcggcggcccgagaagccgccctactcgtacatcgcgctcatcgtcatggccatccagagctcgcccagcaagcgcctgacgctcagcgagatctaccagttcctgcaggcgcgcttccccttcttccgcggcgcctaccagggctggaagaactcggtgcgccacaatctctcgctcaacgagtgcttcatcaagctgcctaagggcctcgggcggcccggcaagggccactactggaccatcgacccggccagcgagttcatgttcgaggagggctcgttccgccgccggccgcgcggcttcaggcggaagtgccaggcgctcaagcccatgtaccaccgcgtggtgagcggcttgggcttcggggcgtcgctgctgccccagggcttcgacttccaggcgcccccgtcggcgccgctcggctgccacagccagggcggctacggcggcctcgacatgatgcccgcgggctacgacgccggcgcgggcgcccccagccacgcgcaccctcaccaccaccaccaccaccacgtcccgcacatgtcgcccaacccgggttccacctacatggccagctgcccggtgcccgcgggacccgggggcgtcggtgcggccgggggcggcggcggcggcgactacgggccggacagcagcagcagcccggtaccctcgtccccggccatggcgagcgccatcgaatgccactcgccctacacgagccctgcggcgcactggagctcgcctggcgcctcgccttacctcaagcagccgcctgccctgacgcccagcagcaaccccgccgcctcggcaggcctgcactccagcatgtcctcctactcgctggagcagagctacttgcaccagaacgctcgcgaggacctctcagtgggactgccccgttaccagcatcactctactccagtgtgtgacagaaaagatttcgtcctcaacttcaatgggatttcttctttccatccctcagctagcgggtcgtattatcaccatcaccaccagagcgtctgtcaggatattaagccctgcgtcatgtgaacggaaagaggccaagcgatggccgctctctcctctcccctcctcagagggggcagatagaaactgggacggattcaagtcacatgcacgcggatagcagtaagccacacacctgccacttagccagaatgcccaggatcgcgttggtcactgttatttgcctactgctggaagaaggacaaccgctggcaaggtagcgttccccaatctgaatacctgcaggctcccacatgagggagagggcagactcaggtgggaagatgtgccatgcgtaaggcatcaacgtgtatctgtgggatcttcgttgccttcagtaatcagggtgtgaaaaaagcagacaagttgtgtgtgtgtgtgtgtgtctaagaaaacttgtgtgcttttcaaaaaggcagtgctaagcacaagatttcaagaaagcctcttcttgttgcctagctgagtgggagagtcattttccccagacactacatttggatacaggtgccaaagaacattattaaggaattatttagaaacaatgtgtctagtttaagaaagtggttttcagtattgtgacaatacaacgtttttacaaggttgttttctaccaccatattttaaagatatttttatgaccgtgtatactcacactttgcttgtattttaaaaggaggatatatttgcacttatgtatacttttacagtttgccaaaatattttgttgtaaaattttttttcaataaaatgtatataaca

SEQ ID NO: 142 - DNA, 1722 bp, Homo sapiens
gcggccggtcgaccggagtggctgccctgcgcggggacactcagagcccggtgggcgggaggaaggcggcatgccccagacggtgatcctcccgggccctgcgccctggggcttcaggctctcagggggcatagacttcaaccagcctttggtcatcaccaggattacaccaggaagcaaggcggcagctgccaacctgtgtcctggagatgtcatcctggctattgacggctttgggacagagtccatgactcatgctgatgcgcaggacaggattaaagcagcagctcaccagctgtgtctcaaaattgacaggggagaaactcacttatggtctccacaagtatctgaagatgggaaagcccatcctttcaaaatcaacttagaatcagaaccacaggacgggaactactttgaacacaagcataatattcggcccaaacctttcgtgatcccgggccgaagcagtggatgcagcactccctccgggattgactgtggcagtggacgcagcaccccttcttctgtcagtactgttagtaccatttgcccaggtgacttgaaagttgcggctaagctggcccctaacattcctttggaaatggaacttcctggtgtgaagattgtacatgctcagtttaatacacctatgcagttgtactcagatgacaatattatggaaacactccagggtcaggtttcaacagccctaggggaaacacctttgatgaacgagcccacagcctcggtgccccccgagtcggacgtgtaccggatgctccacgacaatcggaatgagcccacacagcctcgccagtcgggctccttcagagtgctccagggaatggtggacgatggctctgatgaccgtccggctggaacgcggagtgtgagagctccggtgacgaaagtccatggcggttcaggcggggcacagaggatgccgctctgtgacaaatgtgggagtggcatagttggtgctgtggtgaaggcgcgggataagtaccggcaccctgagtgcttcgtgtgtgccgactgcaacctcaacctcaagcaaaagggctacttcttcatagaaggggagctgtactgcgaaacccacgcaagagcccgcacaaagcccccagagggctatgacacggtcactctgtatcccaaagcttaagtctctgcaggcgtggcacgcacgcacgcacccacccacgcgcacttacacgagaagacattcatggctttgggcagaaggattgtgcagattgtcaactccaaatctaaagtcaaggctttagacctttatcctattgtttattgaggaaaaggaatgggaggcaaatgcctgctatgtgaaaaaaacatacacttagctatgttttgcaactctttttggggctagcaataatgatatttaaagcaataattttttgtatgtcatactccacaatttacatgtatattacagccatcaaacacataaacatcaagatatttgaaggactctaattgtctttccttgacaagttgattttgcaattgtggtaaatagcaaataacaatcttgtattctaacataatctgcagttgtctgtatgtgttttaactattacagtgcatgttagggagaaattccctgaatttctttagttttgtattcaaacaattatgccactcgatgcaacaaacataataaatacataaaggatttaaaaaaaaaaaaaaaaaaaa

SEQ ID NO: 143 - DNA, 850 bp, Homo sapiens
gcgccttcctctccgcagccccccgggatgcggtagcggccgctgtgcggaggccgcgaagcagctgcagccgccgccgcgcagatccacgctggctccgtgcgccatggtcacccacagcaagtttcccgccgccgggatgagccgccccctggacaccagcctgcgcctcaagaccttcagctccaagagcgagtaccagctggtggtgaacgcagtgcgcaagctgcaggagagcggcttctactggagcgcagtgaccggcggcgaggcgaacctgctgctcagtgccgagcccgccggcacctttctgatccgcgacagctcggaccagcgccacttcttcgcgctcagcgtcaagacccagtctgggaccaagaacctgcgcatccagtgtgaggggggcagcttctctctgcagagcgatccccggagcacgcagcccgtgccccgcttcgactgcgtgctcaagctggtgtaccactacatgccgccccctggagccccctccttcccctcgccacctactgaaccctcctccgaggtgcccgagcagccgtctgcccagccactccctgggagtccccccagaagagcctattacatctactccgggggcgagaagatccccctggtgttgagccggcccctctcctccaacgtggccactcttcagcatctctgtcggaagaccgtcaacggccacctggactcctatgagaaagtcacccagctgccggggcccattcgggagttcctggaccagtacgatgccccgctttaaggggtaaagggcgcaaagggcatgggtcgggagaggggacgcaggcccctctcctccgtggcacat

SEQ ID NO: 144 - DNA, 850 bp, Homo sapiens; identical to SEQ ID NO: 143

SEQ ID NO: 145 - DNA, 850 bp, Homo sapiens; identical to SEQ ID NO: 143

SEQ ID NO: 146 - DNA, 850 bp, Homo sapiens; identical to SEQ ID NO: 143

SEQ ID NO: 147 - DNA, 850 bp, Homo sapiens; identical to SEQ ID NO: 143

SEQ ID NO: 148 - DNA, 850 bp, Homo sapiens; identical to SEQ ID NO: 143

SEQ ID NO: 149 - DNA, 850 bp, Homo sapiens; identical to SEQ ID NO: 143

SEQ ID NO: 150 - DNA, 850 bp, Homo sapiens; identical to SEQ ID NO: 143

SEQ ID NO: 151 - DNA, 2713 bp, Homo sapiens
  Homo sapiens melanoma antigen, family D,1 (MAGED1), mRNA
ggcacgaggagagtgcggctgctgagagccgagcccagcaatcccgatcctctgagtcgtgaagaagggaggcagcgagggggttggggttggggcctgaggcaagcccccaggctccgctcttgccagagggacaggagccatggctcagaaaatggactgtggtgcgggcctcctcggcttccaggctgaggcctccgtagaagacagcgccttgcttatgcagaccttgatggaggccatccagatctcagaggctccacctactaaccaggccaccgcagctgctagtccccagagttcacagcccccaactgccaatgagatggctgacattcaggtttcagcagctgccgctaggcctaagtcagcctttaaagtccagaatgccaccacaaaaggcccaaatggtgtctatgatttctctcaggctcataatgccaaggatgtgcccaacacgcagcccaaggcagcctttaagtcccaaaatgctacctccaaaggtccaaatgctgcctatgatttttcccaggcagcaaccactggtgagttagctgctaacaagtctgagatggccttcaaggcccagaatgccactactaaagtgggcccaaatgccacctacaatttctctcagtctctcaatgccaatgacctggccaacagcaggcctaagacccctttcaaggcttggaatgataccactaaggccccaacagctgatacccagacccagaatgtaaatcaggccaaaatggccacttcccaggctgacatagagaccgacccaggtatctctgaacctgacggtgcaactgcacagacatcagcagatggttcccaggctcagaatctggagtcccggacaataattcggggcaagaggacccgcaagattaataacttgaatgttgaagagaacagcagtggggatcagaggcgggccccactggctgcagggacctggaggtctgcaccagttccagtgaccactcagaacccacctggcgcaccccccaatgtgctctggcagacgccattggcttggcagaacccctcaggctggcaaaaccagacagccaggcagaccccaccagcacgtcagagccctccagctaggcagaccccaccagcctggcagaacccagtcgcttggcagaacccagtgatttggccaaacccagtaatctggcagaacccagtgatctggccaaaccccattgtctggcccggccctgttgtctggccgaatccactggcctggcagaatccacctggatggcagactccacctggatggcagaccccaccgggctggcagggtcctccagactggcaaggtcctcctgactggccgctaccacccgactggccactgccacctgattggccacttcccactgactggccactaccacctgactggatccccgctgattggccaattccacctgactggcagaacctgcgcccctcgcctaacctgcgcccttctcccaactcgcgtgcctcacagaacccaggtgctgcacagccccgagatgtggcccttcttcaggaaagagcaaataagttggtcaagtacttgatgcttaaggactacacaaaggtgcccatcaagcgctcagaaatgctgagagatatcatccgtgaatacactgatgtttatccagaaatcattgaacgtgcatgctttgtcctagagaagaaatttgggattcaactgaaagaaattgacaaagaagaacacctgtatattctcatcagtacccccgagtccctggctggcatactgggaacgaccaaagacacacccaagctcggtctcctcttggtgattctgggtgtcatcttcatgaatggcaaccgtgccagtgaggctgtcctctgggaggcactacgcaagatgggactgcgtcctggggtgagacatcccctccttggagatctaaggaaacttctcacctatgagtttgtaaagcagaaatacctggactacagacgagtgcccaacagcaaccccccggagtatgagttcctctggggcctccgttcctaccatgagactagcaagatgaaagtgctgagattcattgcagaggttcagaaaagagaccctcgtgactggactgcacagttcatggaggctgcagatgaggccttggatgctctggatgctgctgcagctgaggccgaagcccgggctgaagcaagaacccgcatgggaattggagatgaggctgtgtctgggccctggagctgggatgacattgagtttgagctgctgacctgggatgaggaaggagattttggagatccctggtccagaattccatttaccttctgggccagataccaccagaatgcccgctccagattccctcagacctttgccggtcccattattggtcctggtggtacagccagtgccaacttcgctgccaactttggtgccattggtttcttctgggttgagtgagatgttggatattgctatcaatcgcagtagtctttcccctgtgtgagctgaagcctcagattccttctaaacacagctatctagagagccacatcctgttgactgaaagtggcatgcaagataaatttatttgctgttccttgtctactgctttttttccccttgtgtgctgtcaagttttggtatcagaaataaacattgaaattgcaaagtgaaaaaaaaaaaaaaaaaaaa

SEQ ID NO: 152 - DNA, 480 bp, Homo sapiens
  Homo sapiens S100 calcium-binding protein A13 (S100A13), mRNA
tctccttgccgggtcagccctgacaaaggtcagctagccccttgaggacatcagctttggcctcagggtcctaatggcagcagaaccactgacagagctagaggagtccattgagaccgtggtcaccaccttcttcacctttgcaaggcaggagggccggaaggatagcctcagcgtcaacgagttcaaagagctggttacccagcagttgccccatctgctcaaggatgtgggctctcttgatgagaagatgaagagcttggatgtgaatcaggactcggagctcaagttcaatgagtactggagattgattggggagctggccaaggaaatcaggaagaagaaagacctgaagatcaggaagaagtaaagccgcctggctgagatggggtgggcagggcagagctgatcagggccgagcagaaccgcactcttcccaaataaagcttcctccttgaaaaaaaaaaaaaaaaaaaaaaa

SEQ ID NO: 153 - DNA, 509 bp, Homo sapiens
  Homo sapiens Deleted in split-hand/split-foot 1 region (DSS1), mRNA
attctttccccaagtctctatggtagcgtcagcgtcggaggcggtagtgacggtggcgtttccttgaggaagagtgagggttccaacttttctgcttatctgggaggtgttgggcgcggacagtcgagatgtcagagaaaaagcagccggtagacttaggtctgttagaggaagacgacgagtttgaagagttccctgccgaagactgggctggcttagatgaagatgaagatgcacatgtctgggaggataattgggatgatgacaatgtagaggatgacttctctaatcagttacgagctgaactagagaaacatggttataagatggagacttcatagcatccagaagaagtgttgaagtaacctaaacttgacctgcttaatacattctagggcagagaacccaggatgggacactaaaaaaatgtgtttatttcattatctgcttggatttatttgtgtttttgtaacacaaaaaataaatgttttgatataaaaaaaaaaaaa

SEQ ID NO: 154 - DNA, 4049 bp, Homo sapiens
  Homo sapiens cysteine knot superfamily 1, BMP antagonist 1 (CKTSF1B1), mRNA
gcggccgcactcagcgccacgcgtcgaaagcgcaggccccgaggacccgccgcactgacagtatgagccgcacagcctacacggtgggagccctgcttctcctcttggggaccctgctgccggctgctgaagggaaaaagaaagggtcccaaggtgccatccccccgccagacaaggcccagcacaatgactcagagcagactcagtcgccccagcagcctggctccaggaaccgggggcggggccaagggcggggcactgccatgcccggggaggaggtgctggagtccagccaagaggccctgcatgtgacggagcgcaaatacctgaagcgagactggtgcaaaacccagccgcttaagcagaccatccacgaggaaggctgcaacagtcgcaccatcatcaaccgcttctgttacggccagtgcaactctttctacatccccaggcacatccggaaggaggaaggttcctttcagtcctgctccttctgcaagcccaagaaattcactaccatgatggtcacactcaactgccctgaactacagccacctaccaagaagaagagagtcacacgtgtgaagcagtgtcgttgcatatccatcgatttggattaagccaaatccaggtgcacccagcatgtcctaggaatgcagccccaggaagtcccagacctaaaacaaccagattcttacttggcttaaacctagaggccagaagaacccccagctgcctcctggcaggagcctgcttgtgcgtagttcgtgtgcatgagtgtggatgggtgcctgtgggtgtttttagacaccagagaaaacacagtctctgctagagagcactccctattttgtaaacatatctgctttaatggggatgtaccagaaacccacctcaccccggctcacatctaaaggggcggggccgtggtctggttctgactttgtgtttttgtgccctcctggggaccagaatctcctttcggaatgaatgttcatggaagaggctcctctgagggcaagagacctgttttagtgctgcattcgacatggaaaagtccttttaacctgtgcttgcatcctcctttcctcctcctcctcacaatccatctcttcttaagttgatagtgactatgtcagtctaatctcttgtttgccaaggttcctaaattaattcacttaaccatgatgcaaatgtttttcattttgtgaagaccctccagactctgggagaggctggtgtgggcaaggacaagcaggatagtggagtgagaaagggagggtggagggtgaggccaaatcaggtccagcaaaagtcagtagggacattgcagaagcttgaaaggccaataccagaacacaggctgatgcttctgagaaagtcttttcctagtatttaacagaacccaagtgaacagaggagaaatgagattgccagaaagtgattaactttggccgttgcaatctgctcaaacctaacaccaaactgaaaacataaatactgaccactcctatgttcggacccaagcaagttagctaaaccaaaccaactcctctgctttgtccctcaggtggaaaagagaggtagtttagaactctctgcataggggtgggaattaatcaaaaacckcagaggctgaaattcctaatacctttcctttatcgtggttatagtcagctcatttccattccactatttcccataatgcttctgagagccactaacttgattgataaagatcctgcctctgctgagtgtacctgacagtaagtctaaagatgaragagtttagggactactctgttttagcaagaratattktgggggtctttttgttttaactattgtcaggagattgggctaragagaagacgacgagagtaaggaaataaagggrattgcctctggctagagagtaagttaggtgttaatacctggtagaaatgtaagggatatgacctccctttctttatgtgctcactgaggatctgaggggaccctgttaggagagcatagcatcatgatgtattagctgttcatctgctactggttggatggacataactattgtaactattcagtatttactggtaggcactgtcctctgattaaacttggcctactggcaatggctacttaggattgatctaagggccaaagtgcagggtgggtgaactttattgtactttggatttggttaacctgttttcttcaagcctgaggttttatatacaaactccctgaatactctttttgccttgtatcttctcagcctcctagccaagtcctatgtaatatggaaaacaaacactgcagacttgagattcagttgccgatcaaggctctggcattcagagaacccttgcaactcgagaagctgtttttatttcgtttttgttttgatccagtgctctcccatctaacaactaaacaggagccatttcaaggcgggagatattttaaacacccaaaatgttgggtctgattttcaaacttttaaactcactactgatgattctcacgctaggcgaatttgtccaaacacatagtgtgtgtgttttgtatacactgtatgaccccaccccaaatctttgtattgtccacattctccaacaataaagcacagagtggatttaattaagcacacaaatgctaaggcagaattttgagggtgggagagaagaaaagggaaagaagctgaaaatgtaaaaccacaccagggaggaaaaatgacattcagaaccagcaaacactgaatttctcttgttgttttaactctgccacaagaatgcaatttcgttaatggagatgacttaagttggcagcagtaatcttcttttaggagcttgtaccacagtcttgcacataagtgcagatttggctcaagtaaagagaatttcctcaacactaacttcactgggataatcagcagcgtaactaccctaaaagcatatcactagccaaagagggaaatatctgttcttcttactgtgcctatattaagactagtacaaatgtggtgtgtcttccaactttcattgaaaatgccatatctataccatattttattcgagtcactgatgatgtaatgatatattttttcattattatagtagaatatttttatggcaagatatttgtggtcttgatcatacctattaaaataatgccaaacaccaaatatgaattttatgatgtacactttgtgcttggcattaaaagaaaaaaacacacatcctggaagtctgtaagttgttttttgttactgtaggtcttcaaagttaagagtgtaagtgaaaaatctggaggagaggataatttccactgtgtggaatgtgaatagttaaatgaaaagttatggttatttaatgtaattattacttcaaatcctttggtcactgtgatttcaagcatgttttctttttctcctttatatgactttctctgagttgggcaaagaagaagctgacacaccgtatgttgttagagtcttttatctggtcaggggaaacaaaatcttgacccagctgaacatgtcttcctgagtcagtgcctgaatctttattttttaaattgaatgttccttaaaggttaacatttctaaagcaatattaagaaagactttaaatgttattttggaagacttacgatgcatgtatacaaacgaatagcagataatgatgactagttcacacataaagtccttttaaggagaaaatctaaaatgaaaagtggataaacagaacatttataagtgatcagttaatgcctaagagtgaaagtagttctattgacattcctcaagatatttaatatcaactgcattatgtattatgtctgcttaaatcatttaaaaacggcaaagaattatatagactatgaggtaccttgctgtgtaggaggatgaaaggggagttgatagtctcataaaactaatttggcttcaagtttcatgaatctgtaactagaatttaattttcaccccaataatgttctatatagcctttgctaaagagcaactaataaattaaacctattctttcaaaaaaaaa

SEQ ID NO: 155 - DNA, 804 bp, Homo sapiens
  Homo sapiens proenkephalin (PENK), mRNA
atggcgcggttcctgacactttgcacttggctgctgttgctcggccccgggctcctggcgaccgtgcgggccgaatgcagccaggattgcgcgacgtgcagctaccgcctagtgcgcccggccgacatcaacttcctggcttgcgtaatggaatgtgaaggtaaactgccttctctgaaaatttgggaaacctgcaaggagctcctgcagctgtccaaaccagagcttcctcaagatggcaccagcaccctcagagaaaatagcaaaccggaagaaagccatttgctagccaaaaggtatgggggcttcatgaaaaggtatggaggcttcatgaagaaaatggatgagctttatcccatggagccagaagaagaggccaatggaagtgagatcctcgccaagcggtatgggggcttcatgaagaaggatgcagaggaggacgactcgctggccaattcctcagacctgctaaaagagcttctggaaacaggggacaaccgagagcgtagccaccaccaggatggcagtgataatgaggaagaagtgagcaagagatatgggggcttcatgagaggcttaaagagaagcccccaactggaagatgaagccaaagagctgcagaagcgatatgggggcttcatgagaagagtaggtcgcccagagtggtggatggactaccagaaacggtatggaggtttcctgaagcgctttgccgaggctctgccctccgacgaagaaggcgaaagttactccaaagaagttcctgaaatggaaaaaagatacggaggatttatgagattttaa

SEQ ID NO: 156 - DNA, 1647 bp, Homo sapiens
  Homo sapiens protease, serine, 23 (SPUVE), mRNA
ggcaggcatgggagccgcgcgctctctcccggcgcccacacctgtctgagcggcgcagcgagccgcggcccgggcgggctgctcggcgcggaacagtgctcggcatggcagggattccagggctcctcttccttctcttctttctgctctgtgctgttgggcaagtgagcccttacagtgccccctggaaacccacttggcctgcataccgcctccctgtcgtcttgccccagtctaccctcaatttagccaagccagactttggagccgaagccaaattagaagtatcttcttcatgtggaccccagtgtcataagggaactccactgcccacttacgaagaggccaagcaatatctgtcttatgaaacgctctatgccaatggcagccgcacagagacgcaggtgggcatctacatcctcagcagtagtggagatggggcccaacaccgagactcagggtcttcaggaaagtctcgaaggaagcggcagatttatggctatgacagcaggttcagcatttttgggaaggacttcctgctcaactaccctttctcaacatcagtgaagttatccacgggctgcaccggcaccctggtggcagagaagcatgtcctcacagctgcccactgcatacacgatggaaaaacctatgtgaaaggaacccagaagcttcgagtgggcttcctaaagcccaagtttaaagatggtggtcgaggggccaacgactccacttcagccatgcccgagcagatgaaatttcagtggatccgggtgaaacgcacccatgtgcccaagggttggatcaagggcaatgccaatgacatcggcatggattatgattatgccctcctggaactcaaaaagccccacaagagaaaatttatgaagattggggtgagccctcctgctaagcagctgccagggggcagaattcacttctctggttatgacaatgaccgaccaggcaatttggtgtatcgcttctgtgacgtcaaagacgagacctatgacttgctctaccagcaatgcgatgcccagccaggggccagcgggtctggggtctatgtgaggatgtggaagagacagcagcagaagtgggagcgaaaaattattggcattttttcagggcaccagtgggtggacatgaatggttccccacaggatttcaacgtggctgtcagaatcactcctctcaaatatgcccagatttgctattggattaaaggaaactacctggattgtagggaggggtgacacagtgttccctcctggcagcaattaagggtcttcatgttcttattttaggagaggccaaattgttttttgtcattggcgtgcacacgtgtgtgtgtgtgtgtgtgtgtgtgtaaggtgtcttataatcttttacctatttcttacaattgcaagatgactggctttactatttgaaaactggtttgtgtatcatatcatatatcatttaagcagtttgaaggcatacttttgcatagaaataaaaaaaatactgatttggggcaatgaggaatatttgacaattaagttaatcttcacgtttttgcaaactttgatttttatttcatctgaacttgtttcaaagatttatattaaatatttggcatacaagagaaaaaaaaaaaaaaaa

SEQ ID NO: 157 - DNA, 732 bp, Homo sapiens
  Homo sapiens fibroblast growth factor 12 (FGF12), mRNA
atggctgcggcgatagccagctccttgatccggcagaagcggcaggcgagggagtccaacagcgaccgagtgtcggcctccaagcgccgctccagccccagcaaagacgggcgctccctgtgcgagaggcacgtcctcggggtgttcagcaaagtgcgcttctgcagcggccgcaagaggccggtgaggcggagaccagaaccccagctcaaagggattgtgacaaggttattcagccagcagggatacttcctgcagatgcacccagatggtaccattgatgggaccaaggacgaaaacagcgactacactctcttcaatctaattcccgtgggcctgcgtgtagtggccatccaaggagtgaaggctagcctctatgtggccatgaatggtgaaggctatctctacagttcagatgttttcactccagaatgcaaattcaaggaatctgtgtttgaaaactactatgtgatctattcttccacactgtaccgccagcaagaatcaggccgagcttggtttctgggactcaataaagaaggtcaaattatgaaggggaacagagtgaagaaaaccaagccctcatcacattttgtaccgaaacctattgaagtgtgtatgtacagagaaccatcgctacatgaaattggagaaaaacaagggcgttcaaggaaaagttctggaacaccaaccatgaatggaggcaaagttgtgaatcaagattcaacatag

SEQ ID NO: 158 - DNA, 2461 bp, Homo sapiens
  Homo sapiens growth arrest-specific 6 (GAS6), mRNA
ccgcagccgccgccgccgccgccgccgcgatgtgaccttcagggccgccaggacgggatgaccggagcctccgccccgcggcgcccgctcgcctcggcctcccgggcgctctgaccgcgcgtccccggcccgccatggccccttcgctctcgcccgggcccgccgccctgcgccgcgcgccgcagctgctgctgctgctgctggccgcggagtgcgcgcttgccgcgctgttgccggcgcgcgaggccacgcagttcctgcggcccaggcagcgccgcgcctttcaggtcttcgaggaggccaagcagggccacctggagagggagtgcgtggaggagctgtgcagccgcgaggaggcgcgggaggtgttcgagaacgaccccgagacggattatttttacccaagatacttagactgcatcaacaagtatgggtctccgtacaccaaaaactcaggcttcgccacctgcgtgcaaaacctgcctgaccagtgcacgcccaacccctgcgataggaaggggacccaagcctgccaggacctcatgggcaacttcttctgcctgtgtaaagctggctgggggggccggctctgcgacaaagatgtcaacgaatgcagccaggagaacgggggctgcctccagatctgccacaacaagccgggtagcttccactgttcctgccacagcggcttcgagctctcctctgatggcaggacctgccaagacatagacgagtgcgcagactcggaggcctgcggggaggcgcgctgcaagaacctgcccggctcctactcctgcctctgtgacgagggctttgcgtacagctcccaggagaaggcttgccgagatgtggacgagtgtctgcagggccgctgtgagcaggtctgcgtgaactccccagggagctacacctgccactgtgacgggcgtgggggcctcaagctgtcccaggacatggacacctgtgaggacatcttgccgtgcgtgcccttcagcgtggccaagagtgtgaagtccttgtacctgggccggatgttcagtgggacccccgtgatccgactgcgcttcaagaggctgcagcccaccaggctggtagctgagtttgacttccggacctttgaccccgagggcatcctcctctttgccggaggccaccaggacagcacctggatcgtgctggccctgagagccggccggctggagctgcagctgcgctacaacggtgtcggccgtgtcaccagcagcggcccggtcatcaaccatggcatgtggcagacaatctctgttgaggagctggcgcggaatctggtcatcaaggtcaacagggatgctgtcatgaaaatcgcggtggccggggacttgttccaaccggagcgaggactgtatcatctgaacctgaccgtgggaggtattcccttccatgagaaggacctcgtgcagcctataaaccctcgtctggatggctgcatgaggagctggaactggctgaacggagaagacaccaccatccaggaaacggtgaaagtgaacacgaggatgcagtgcttctcggtgacggagagaggctctttctaccccgggagcggcttcgccttctacagcctggactacatgcggacccctctggacgtcgggactgaatcaacctgggaagtagaagtcgtggctcacatccgcccagccgcagacacaggcgtgctgtttgcgctctgggcccccgacctccgtgccgtgcctctctctgtggcactggtagactatcactccacgaagaaactcaagaagcagctggtggtcctggccgtggagcatacggccttggccctaatggagatcaaggtctgcgacggccaagagcacgtggtcaccgtctcgctgagggacggtgaggccaccctggaggtggacggcaccaggggccagagcgaggtgagcgccgcgcagctgcaggagaggctggccgtgctcgagaggcacctgcggagccccgtgctcacctttgctggcggcctgccagatgtgccggtgacttcagcgccagtcaccgcgttctaccgcggctgcatgacactggaggtcaaccggaggctgctggacctggacgaggcggcgtacaagcacagcgacatcacggcccactcctgcccccccgtggagcccgccgcagcctaggcccccacgggacgcggcaggcttctcagtctctgtccgagacagccgggaggagcctgggggctcctcaccacgtggggccatgctgagagctgggctttcctctgtgaccatcccggcctgtaacatatctgtaaatagtgagatggacttggggcctctgacgccgcgcactcagccgtgggcccgggcgcggggaggccggcgcagcgcagagcgggctcgaagaaaataattctctattatttttattaccaagcgcttctttctgactctaaaatatggaaaat

SEQ ID NO: 159 - DNA, 1860 bp, Homo sapiens
  Homo sapiens angiopoietin-like 4 (ANGPTL4), mRNA
gcggatcctcacacgactgtgatccgattctttccagcggcttctgcaaccaagcgggtcttacccccggtcctccgcgtctccagtcctcgcacctggaaccccaacgtccccgagagtccccgaatccccgctcccaggctacctaagaggatgagcggtgctccgacggccggggcagccctgatgctctgcgccgccaccgccgtgctactgagcgctcagggcggacccgtgcagtccaagtcgccgcgctttgcgtcctgggacgagatgaatgtcctggcgcacggactcctgcagctcggccaggggtgcgcgaacaccggagcgcacccgcagtcagctgagcgcgctggagcgcgcctgagcgcgtgcgggtccgcctgtcagggaaccgaggggtccaccgacctcccgttagcccctgagagccgggtggaccctgaggtccttcacagcctgcagacacaactcaaggctcagaacagcaggatccagcaactcttccacaaggtggcccagcagcagcggcacctggagaagcagcacctgcgaattcagcatctgcaaagccagtttggcctcctggaccacaagcacctagaccatgaggtggccaagcctgcccgaagaaagaggctgcccgagatggcccagccagttgacccggctcacaatgtcagccgcctgcaccggctgcccagggattgccaggagctgttccaggttggggagaggcagagtggactatttgaaatccagcctcaggggtctccgccatttttggtgaactgcaagatgacctcagatggaggctggacagtaattcagaggcgccacgatggctcagtggacttcaaccggccctgggaagcctacaaggcggggtttggggatccccacggcgagttctggctgggtctggagaaggtgcatagcatcacgggggaccgcaacagccgcctggccgtgcagctgcgggactgggatggcaacgccgagttgctgcagttctccgtgcacctgggtggcgaggacacggcctatagcctgcagctcactgcacccgtggccggccagctgggcgccaccaccgtcccacccagcggcctctccgtacccttctccacttgggaccaggatcacgacctccgcagggacaagaactgcgccaagagcctctctggaggctggtggtttggcacctgcagccattccaacctcaacggccagtacttccgctccatcccacagcagcggcagaagcttaagaagggaatcttctggaagacctggcggggccgctactacccgctgcaggccaccaccatgttgatccagcccatggcagcagaggcagcctcctagcgtcctggctgggcctggtcccaggcccacgaaagacggtgactcttggctctgcccgaggatgtggccaagaccacgactggagaagccccctttctgagtgcaggggggctgcatgcgttgcctcctgagatcgaggctgcaggatatgctcagactctagaggcgtggaccaaggggcatggagcttcactccttgctggccagggagttggggactcagagggaccacttggggccagccagactggcctcaatggcggactcagtcacattgactgacggggaccagggcttgtgtgggtcgagagcgccctcatggtgctggtgctgttgtgtgtaggtcccctggggacacaagcaggcgccaatggtatctgggcggagctcacagagttcttggaataaaagcaacctcagaacaaaaaaaaaaaaaaaaaagcggagctcacagagttcttggaataaaagcaacctcagaacaaaaaa

SEQ ID NO: 160 - DNA, 5896 bp, Homo sapiens
  Homo sapiens jagged 1 (Alagille syndrome) (JAG1)
ctgcggccggcccgcgagctaggctgggtttttttttttctcccctccctcccccctttttccatgcagctgatctaaaagggaataaaaggctgcgcataatcataataataaaagaaggggagcgcgagagaaggaaagaaagccgggaggtggaagaggagggggagcgtctcaaagaagcgatcagaataataaaaggaggccgggctctttgccttctggaacgggccgctcttgaaagggcttttgaaaagtggtgttgttttccagtcgtgcatgctccaatcggcggagtatattagagccgggacgcggcggccgcaggggcagcggcgacggcagcaccggcggcagcaccagcgcgaacagcagcggcggcgtcccgagtgcccgcggcgcgcggcgcagcgatgcgttccccacggacgcgcggccggtccgggcgccccctaagcctcctgctcgccctgctctgtgccctgcgagccaaggtgtgtggggcctcgggtcagttcgagttggagatcctgtccatgcagaacgtgaacggggagctgcagaacgggaactgctgcggcggcgcccggaacccgggagaccgcaagtgcacccgcgacgagtgtgacacatacttcaaagtgtgcctcaaggagtatcagtcccgcgtcacggccggggggccctgcagcttcggctcagggtccacgcctgtcatcgggggcaacaccttcaacctcaaggccagccgcggcaacgaccgcaaccgcatcgtgctgcctttcagtttcgcctggccgaggtcctatacgttgcttgtggaggcgtgggattccagtaatgacaccgttcaacctgacagtattattgaaaaggcttctcactcgggcatgatcaaccccagccggcagtggcagacgctgaagcagaacacgggcgttgcccactttgagtatcagatccgcgtgacctgtgatgactactactatggctttggctgcaataagttctgccgccccagagatgacttctttggacactatgcctgtgaccagaatggcaacaaaacttgcatggaaggctggatgggccccgaatgtaacagagctatttgccgacaaggctgcagtcctaagcatgggtcttgcaaactcccaggtgactgcaggtgccagtatggctggcaaggcctgtactgtgataagtgcatcccacacccgggatgcgtccacggcatctgtaatgagccctggcagtgcctctgtgagaccaactggggcggccagctctgtgacaaagatctcaattactgtgggactcatcagccgtgtctcaacgggggaacttgtagcaacacaggccctgacaaatatcagtgttcctgccctgaggggtattcaggacccaactgtgaaattgctgagcacgcctgcctctctgatccctgtcacaacagaggcagctgtaaggagacctccctgggctttgagtgtgagtgttccccaggctggaccggccccacatgctctacaaacattgatgactgttctcctaataactgttcccacgggggcacctgccaggacctggttaacggatttaagtgtgtgtgccccccacagtggactgggaaaacgtgccagttagatgcaaatgaatgtgaggccaaaccttgtgtaaacgccaaatcctgtaagaatctcattgccagctactactgcgactgtcttcccggctggatgggtcagaattgtgacataaatattaatgactgccttggccagtgtcagaatgacgcctcctgtcgggatttggttaatggttatcgctgtatctgtccacctggctatgcaggcgatcactgtgagagagacatcgatgaatgtgccagcaacccctgtttgaatgggggtcactgtcagaatgaaatcaacagattccagtgtctgtgtcccactggtttctctggaaacctctgtcagctggacatcgattattgtgagcctaatccctgccagaacggtgcccagtgctacaaccgtgccagtgactatttctgcaagtgccccgaggactatgagggcaagaactgctcacacctgaaagaccactgccgcacgaccccctgtgaagtgattgacagctgcacagtggccatggcttccaacgacacacctgaaggggtgcggtatatttcctccaacgtctgtggtcctcacgggaagtgcaagagtcagtcgggaggcaaattcacctgtgactgtaacaaaggcttcacgggaacatactgccatgaaaatattaatgactgtgagagcaacccttgtagaaacggtggcacttgcatcgatggtgtcaactcctacaagtgcatctgtagtgacggctgggagggggcctactgtgaaaccaatattaatgactgcagccagaacccctgccacaatgggggcacgtgtcgcgacctggtcaatgacttctactgtgactgtaaaaatgggtggaaaggaaagacctgccactcacgtgacagtcagtgtgatgaggccacgtgcaacaacggtggcacctgctatgatgagggggatgcttttaagtgcatgtgtcctggcggctgggaaggaacaacctgtaacatagcccgaaacagtagctgcctgcccaacccctgccataatgggggcacatgtgtggtcaacggcgagtcctttacgtgcgtctgcaaggaaggctgggaggggcccatctgtgctcagaataccaatgactgcagccctcatccctgttacaacagcggcacctgtgtggatggagacaactggtaccggtgcgaatgtgccccgggttttgctgggcccgactgcagaataaacatcaatgaatgccagtcttcaccttgtgcctttggagcgacctgtgtggatgagatcaatggctaccggtgtgtctgccctccagggcacagtggtgccaagtgccaggaagtttcagggagaccttgcatcaccatggggagtgtgataccagatggggccaaatgggatgatgactgtaatacctgccagtgcctgaatggacggatcgcctgctcaaaggtctggtgtggccctcgaccttgcctgctccacaaagggcacagcgagtgccccagcgggcagagctgcatccccatcctggacgaccagtgcttcgtccacccctgcactggtgtgggcgagtgtcggtcttccagtctccagccggtgaagacaaagtgcacctctgactcctattaccaggataactgtgcgaacatcacatttacctttaacaaggagatgatgtcaccaggtcttactacggagcacatttgcagtgaattgaggaatttgaatattttgaagaatgtttccgctgaatattcaatctacatcgcttgcgagccttccccttcagcgaacaatgaaatacatgtggccatttctgctgaagatatacgggatgatgggaacccgatcaaggaaatcactgacaaaataatcgatcttgttagtaaacgtgatggaaacagctcgctgattgctgccgttgcagaagtaagagttcagaggcggcctctgaagaacagaacagatttccttgttcccttgctgagctctgtcttaactgtggcttggatctgttgcttggtgacggccttctactggtgcctgcggaagcggcggaagccgggcagccacacacactcagcctctgaggacaacaccaccaacaacgtgcgggagcagctgaaccagatcaaaaaccccattgagaaacatggggccaacacggtccccatcaaggattacgagaacaagaactccaaaatgtctaaaataaggacacacaattctgaagtagaagaggacgacatggacaaacaccagcagaaagcccggtttgccaagcagccggcgtatacgctggtagacagagaagagaagccccccaacggcacgccgacaaaacacccaaactggacaaacaaacaggacaacagagacttggaaagtgcccagagcttaaaccgaatggagtacatcgtatagcagaccgcgggcactgccgccgctaggtagagtctgagggcttgtagttctttaaactgtcgtgtcatactcgagtctgaggccgttgctgacttagaatccctgtgttaatttaagttttgacaagctggcttacactggcaatggtagtttctgtggttggctgggaaatcgagtgccgcatctcacagctatgcaaaaagctagtcaacagtaccctggttgtgtgtccccttgcagccgacacggtctcggatcaggctcccaggagcctgcccagccccctggtctttgagctcccacttctgccagatgtcctaatggtgatgcagtcttagatcatagttttatttatatttattgactcttgagttgtttttgtatattggttttatgatgacgtacaagtagttctgtatttgaaagtgcctttgcagctcagaaccacagcaacgatcacaaatgactttattatttatttttttaattgtatttttgttgttgggggaggggagactttgatgtcagcagttgctggtaaaatgaagaatttaaagaaaaaaatgtcaaaagtagaactttgtatagttatgtaaataattcttttttattaatcactgtgtatatttgatttattaacttaataatcaagagccttaaaacatcattcctttttatttatatgtatgtgtttagaattgaaggtttttgatagcattgtaagcgtatggctttatttttttgaactcttctcattacttgttgcctataagccaaaattaaggtgtttgaaaatagtttattttaaaacaataggatgggcttctgtgcccagaatactgatggaattttttttgtacgacgtcagatgtttaaaacaccttctatagcatcacttaaaacacgttttaaggactgactgaggcagtttgaggattagtttagaacaggtttttttgtttgtttgttttttgtttttctgctttagacttgaaaagagacaggcaggtgatctgctgcagagcagtaagggaacaagttgagctatgacttaacatagccaaaatgtgagtggttgaatatgattaaaaatatcaaattaattgtgtgaacttggaagcacaccaatctgactttgtaaattctgatttcttttcaccattcgtacataatactgaaccacttgtagatttgattttttttttaatctactgcatttagggagtattctaataagctagttgaatacttgaaccataaaatgtccagtaagatcactgtttagatttgccatagagtacactgcctgccttaagtgaggaaatcaaagtgctattacgaagttcaagatcaaaaaggcttataaaacagagtaatcttgttggttcaccattgagaccgtgaagatactttgtattgtcctattagtgttatatgaacatacaaatgcatctttgatgtgttgttcttggcaataaattttgaaaagtaatatttattaaatttttttgtatgaaaacatggaacagtgtggctcttctgagcttacgtagttctaccggctttgccgtgtgcttctgccaccctgctgagtctgttctggtaatcggggtataataggctctgcctgacagagggatggaggaagaactgaaaggcttttcaaccacaaaactcatctggagttctcaaagacctggggctgctgtgaagctggaactgcgggagccccatctaggggagccttgattcccttgttattcaacagcaagtgtgaatactgcttgaataaacaccactggattaatggaaaaaaaaaaaaaaaa

SEQ ID NO: 161 - DNA, 2385 bp, Homo sapiens
  Homo sapiens Wnt-13 mRNA
aaacccactccaccttactaccagacaaccttagccaaaccatttacccaaataaagtataggcgatagaaattgaaacctggcgcaatagatatagtaccgcaagggaaagatgaaaaattataaccaagcataatatagcaaggactaacccctataccttctgcataatgaattaactagaaataactttgcaaggagagtcaaagctaaggcccccgaaaccaggcgagctacctaagaacagctaaaagagcacacccgtctatgtagcaaaatagtgggaagatttataggtagaggcgacaaacctaccgagcctggtgatagctggttgtccaagatagaatcttagttcaactttaaatttgcccacagaaccctctaaatccccttgtaaatttaactgttagtccaaagaggaacagctctttggacactaggaaaaaaccttgtagagagagtgtcagcccaattccacacttttccacatgttggatggccttggagtggtagccataagcatttttggaattcaactaaaaactgaaggatccttgaggacggcagtacctggcatacctacacagtcagcgttcaacaagtgtttgcaaaggtacattggggcactgggggcacgagtgatctgtgacaatatccctggtttggtgagccggcagcggcagctgtgccagcgttacccagacatcatgcgttcagtgggcgagggtgcccgagaatggatccgagagtgtcagcaccaattccgccaccaccgctggaactgtaccaccctggaccgggaccacaccgtctttggccgtgtcatgctcagaagtagccgagaggcagcttttgtatatgccatctcatcagcaggggtgatccacgctattactcgcgcctgtagccagggtgaactgagtgtgtgcagctgtgacccctacacccgtggccgacaccatgaccagcgtgggacttttgactggggtggctgcagtgacaacatccactacggtgtccgttttgccaaggccttcgtggatgccaaggagaagaggcttaaggatgcccgggccctcatgaacttacataataaccgctgtggtcgcacggctgtgcggcggtttgtcaagctggagtgtaagtgccatggcgtgagtggttcctgtactctgcgcacctgctggcgtgcactctcagatttccgccgcacaggtgattacctgcggcgacgctatgatggggctgtgcaggtgatggccacccaagatggtgccaacttcaccgcagcccgccaaggctatcgccgtgccacccggagtgatcttgtctactttgacaactctccagattactgtgtcttggacaaggctgcaggttccctaggcactgcaggccgtgtctgcagcaagacatcaaaaggaacagacggttgtgaaatcatgtgctgtggccgagggtacgacacaactcgagtcacccgtgttacccagtgtgagtgcaaattccactggtgctgtgctgtacggtgcaaggaatgcagaaatactgtggacgtccatacttgcaaagcccccaagaaggcagagtggctggaccagacctgaacacacagatacctcactcatccctccaattcaagcctctcaactcaaaagcacaagatccttgcatgcacaccttcctccaccctccaccctgggctgctaccgcttctatttaaggatgtagagagtaatccatagggaccatggtgtcctggctggttccttagccctgggaaggagttgtcaggggatataagaaactgtgcaagctccctgatttcccgctctggagatttgaagggagagtagaagagatagggggtctttagagtgaaatgagttgcactaaagtacgtagttgaggctccttttttctttcctttgcaccagcttcccgacacttcttggtgtgcaagaggaagggtacctgtagagagcttctttttgtttctacctggccaaagttagatgggacaaagatgaatggcatgtcccttctctgaagtccgtttgagcagaactacctggtaccccgaaagaaaaatcttaggctaccacattctattattgagagcctgagatgttagccatagtggacaaggttccattcacatgctcatatgtttataaactgtgttttgtagaagaaaaagaatcataacaatacaaacacacattcattctctctttttctctctaccattctcaacctgtattggacagcactgcctcttttgcttacttgctgcctgttcaaactgaggtggaatgcagtggttcccatgcttaacagatcattaaaacaccctagaacactcctaggatagattaatgt

SEQ ID NO: 162 - DNA, 2375 bp, Homo sapiens
  Homo sapiens wingless-type MMTV integration site family, member 10A (WNT10A), mRNA
acagtcacttactctacaggcagtggggcccgacacagacagcgccgcccccgccagccagcctcgcacgccctcggaagcgcaggctcccggcgctgcgctggagggttccccggcaccccagcctcccgtccccagcccgctgcacctccgggccccccttacccttgagaggcaccgggagttgtcgcgggggggcctcgggaaattccccggacccctgtgccaggaggtgcccggttcgcccgctcttcaccccccgccccccccgagggcggtgcccgggggtgctgccccatggagcggggaggcgggcgccgtctgctccgggagccctgacccgagtcggagctgtgtgtcgcagccgccccgaccccccgccgatcatgcgccggcgcccctggctctccagtcccactgggctgtgagccccccactcccagcccgtcagggcctgcgcgccatgggcagcgcccaccctcgcccctggctgcggctccgaccccagccccagccgcggccagcgctctgggtgctcctgttcttcctactgctgctggctgctgccatgcccaggtcagcacccaatgacattctggacctccgcctccccccggggcccgtgctcaatgccaacacagtgtgcctaacattgccaggcctgagccggcggcagatggaggtgtgtgtgcgtcaccctgatgtggctgcctcagccatacagggcatccagatcgccatccacgaatgccaacaccaattcagggaccagcgctggaactgctcaagcctggagactcgcaacaagatcccctatgagagtcccatcttcagcagaggtttccgagagagcgcttttgcctacgccatcgcagcagctggcgtggtgcacgccgtgtccaatgcgtgtgccctgggcaaactgaaggcctgtggctgtgatgcgtcccggcgaggggacgaggaggccttccgtaggaagctgcaccgcttacaactggatgcactgcagcgtggtaagggcctgagccatggggtcccggaacacccagccctgcccacagccagcccaggcctgcaggactcctgggagtggggcggctgcagccccgacatgggcttcggggagcgcttttctaaggactttctggactcccgggagcctcacagagacatccacgcgagaatgaggcttcacaacaaccgagttgggaggcaggcagtgatggagaacatgcggcggaagtgcaagtgccacggcacgtcaggcagctgccagctcaagacgtgctggcaggtgacgcccgagttccgcaccgtgggggcgctgctgcgcagccgcttccaccgcgccacgctcatccggccgcacaaccgcaacggcggccagctggagccgggcccagcgggggcaccctcgccggctccgggcgctcccgggccgcgccgacgggccagccccgccgacctggtctacttcgaaaagtctcccgacttctgcgagcgcgagccgcgcctggactcggcgggcaccgtgggccgcctgtgcaacaagagcagcgccggctcggatggctgcggcagcatgtgctgcggccgcggccacaacatcctgcgccagacgcgcagcgagcgctgccactgccgcttccactggtgctgtttcgtggtctgcgaagagtgccgcatcaccgagtgggtcagcgtctgcaagtgagcggcccggggtcccctgggccctgatcgaggtcccctcctggagcctggccctctgaggcttacggtcttggcaaggcagcatcgccttggctcttgggaagaggagattggaccacatgatcttataggaacccctcagctctgaggtctgtgatcgccggacagtccaggcctgtctgaaccccaccactcacttctgtgggctctaggactgactgggttcttcctccctccccgaagcccagacagttcagttgggctgggggttgctccacaccctaaaacaagcctcagccaggcaacccgtcagtctgtctccatcctttcaccccttccctggagatgggaggtggggaatgaatggaagctgacgggcagagagaggaggattaaaaaaaagaaatagacataactgagctgaagtaattccataaagggcccagacagcctcctccaccattcccttcatcattcatttaacaaatatttattttgcactctctttgcggcactctgggggcggtggggtgcgtgggggtggcaatgcaaggcactgaggccacagatgtgagtaagcgagacacaacacttgtcctcttggaggttacattcttgctggggggaggcatgggcaataaacaagtaaatatacaaac

SEQ ID NO: 163 - DNA, 1640 bp, Homo sapiens
  Homo sapiens vasoactive intestinal peptide receptor 2 (VIPR2), mRNA
cgggacgagggggcggcccccgcgctcggggcgctcggctacagctgcggggcccgaggtctccgcgcactcgctcccggcccatgctggaggcggcggaacccgggggacctaggacggaggcggcgggcgctgggcggcccccggcacgctgagctcgggatgcggacgctgctgcctcccgcgctgctgacctgctggctgctcgcccccgtgaacagcattcacccagaatgccgatttcatctggaaatacaggaggaagaaacaaaatgtacagagcttctgaggtctcaaacagaaaaacacaaagcctgcagtggcgtctgggacaacatcacgtgctggcggcctgccaatgtgggagagaccgtcacggtgccctgcccaaaagtcttcagcaatttttacagcaaagcaggaaacataagcaaaaactgtacgagtgacggatggtcagagacgttcccagatttcgtcgatgcctgtggctacagcgacccggaggatgagagcaagatcacgttttatattctggtgaaggccatttataccctgggctacagtgtctctctgatgtctcttgcaacaggaagcataattctgtgcctcttcaggaagctgcactgcaccaggaattacatccacctgaacctgttcctgtccttcatcctgagagccatctcagtgctggtcaaggacgacgttctctactccagctctggcacgttgcactgccctgaccagccatcctcctgggtgggctgcaagctgagcctggtcttcctgcagtactgcatcatggccaacttcttctggctgctggtggaggggctctacctccacaccctcctggtggccatgctcccccctagaaggtgcttcctggcctacctcctgatcggatggggcctccccaccgtctgcatcggtgcatggactgcggccaggctctacttagaagacaccggttgctgggatacaaacgaccacagtgtgccctggtgggtcatacgaataccgattttaatttccatcatcgtcaattttgtccttttcattagtattatacgaattttgctgcagaagttaacatccccagatgtcggcggcaacgaccagtctcagtacaagaggctggccaagtccacgctcctgcttatcccgctgttcggcgtccactacatggtgtttgccgtgtttcccatcagcatctcctccaaataccagatactgtttgagctgtgcctcgggtcgttccagggcctggtggtggccgtcctctactgtttcctgaacagtgaggtgcagtgcgagctgaagcgaaaatggcgaagccggtgcccgaccccgtccgcgagccgggattacagggtctgcggttcctccttctcccacaacggctcggagggcgccctgcagttccaccgcgcgtcccgagcccagtccttcctgcaaacggagacctcggtcatctagccccacccctgcctgtcggacgcggcgggaggcccacggttcggggcttctgcggggctgagacgccggcttcctccttccagatgcccgagcaccgtgtcgggcaggtcagcgcggtcctgactccgtcaagctggttgtccactaaaccccatacctgg

SEQ ID NO: 164 - DNA, 987 bp, Homo sapiens
  Human receptor tyrosine kinase ligand LERK-3 (EPLG3) mRNA, complete cds
ggagaagccgggagcgcggggctcagtcggggggcggcggcggcggcggctccggggatggcggcggctccgctgctgctgctgctgctgctcgtgcccgtgccgctgctgccgctgctggcccaagggcccggaggggcgctgggaaaccggcatgcggtgtactggaacagctccaaccagcacctgcggcgagagggctacaccgtgcaggtgaacgtgaacgactatctggatatttactgcccgcactacaacagctcgggggtgggccccggggcgggaccggggcccggaggcggggcagagcagtacgtgctgtacatggtgagccgcaacggctaccgcacctgcaacgccagccagggcttcaagcgctgggagtgcaaccggccgcacgccccgcacagccccatcaagttctcggagaagttccagcgctacagcgccttctctctgggctacgagttccacgccggccacgagtactactacatctccacgcccactcacaacctgcactggaagtgtctgaggatgaaggtgttcgtctgctgcgcctccacatcgcactccggggagaagccggtccccactctcccccagttcaccatgggccccaatgtgaagatcaacgtgctggaagactttgagggagagaaccctcaggtgcccaagcttgagaagagcatcagcgggaccagccccaaacgggaacacctgcccctggccgtgggcatcgccttcttcctcatgacgttcttggcctcctagctctgccccctcccctggggggggagagatggggcggggcttggaaggagcagggagcctttggcctctccaagggaagcctagtgggcctagacccctcctcccatggctagaagtggggcctgcaccatacatctgtgtccgccccctctaccccttccccccacgtagggcactgtagtggaccaagcacggggacagccatgggtcccg

SEQ ID NO: 165 - DNA, 1793 bp, Homo sapiens
  Homo sapiens interleukin 14 (IL14), mRNA
aacaccttcagaaataatcctttgggtgatctcttgtcaatcatttgtgcaggctagagaggcacctgtgaatgataaggctactgagaagcatcattggcctggtcctggcactaccaaagggcaggggaagcgatgcccaaggggctcctgaccagcacatcatcccacgcaaaaacattctccaggtcccttgttccaggcaggaaatccccagctctgagcgccctgccagggctctgcctagggacaccttttccaggtctagagaatcaaaggagcctccagagcagctaggagggcctgagctgaccaagcaagccctgctcacaagacaaatgcagtcaagacctgggtgtattacttgtcttgagctctgaagggcagggaggggtctgagcctcaaatcagacagagaaatgctcaagtcacttctgccaactcactgtgatggcagctacagatgacagcccctctcaagactcttcagctcacagacaagccactgacttcatctgtacacacccccatccccaatgcaagcccactgtacacttacaggtataaatgcatttgcaaggccttgcaaaatgccctatgtacgtaaaactgacccacaaaatccaaaattgcaagtgccagatgccagccaggtcagaacatcctggcttcagcaatgggctgctcagcatgggagccttttatgggccaggcctggctgggctgccgctcccttcccagcatgacccaacaccaggctctctaggccctggcggaggtgggctcttgaggcccagtctggcctgatgcttctgtgctcggtgctcctgggtagcaaggcgcttctgtgaccctgggggagctgggtgcttgagccccaggcccctctggcctcctctcagggccactgtcagtgagggagccctggccaccagcactcaggtcctgtaccctcttgttcaggtcattgcgctctgtctgcagtgcccggcacagcttctccagccgttggatttttacctgcaggccctccagttctttatcccggactgttttctcctcagccatctcaagcagggccttgttgctgctctcccaccgggaccggtacatggtggtttctttctccagcttcttgatcttcttagtcatcttttccatctcctgcttgaatgtggtgaatacctcgctgcttttggaaagtgtgttctggaactcctcaaacttctctgtgtatagggcaagctgttgcttcaggtgggtctcttgctgcttcatcagctcacacatcctctgggactctactgcctctttcaggagaaaatccttctcccgctggtgccgctcttctgcctcctttagcatctcctgggcctgctggagcttggcatccaccagctgctgttgtaggtccttgtgtttgaagactttgtcgatatgctcctcgcgcagctcatactgctcaatcagcttcttgagcctctcagccagctccatgttctcttggcgcagcttggagttgcgctcattgtgctgttccatctgcagctgaatgtcattcagtgtcacctggaagtgcgaggtcacctccttgcgcttctcctcctcctcccgggcccgctgcacaccttcttccttgagggagcggttgtgccgctgcagctcacggcataggctctcaagcttgctgcgggccaggacggccttgctgtgctcaccgcgcaggtggtccttctcttgcaccagctggctctgctttttctgtaggagcttcatctgcttctgtgaattcc

SEQ ID NO: 166 - DNA, 5015 bp, Homo sapiens
  Homo sapiens slit (Drosophila) homolog 3 (SLIT3), mRNA
gcgctccgcacctgggcactcccagcgatgcgcagcggggcagcgccggccccgccgatggagctgctgttgctgccgccgccgccgcccggagcgccccgctccgcccgcgccccgtgcgcctgagcaccgagctcgcccctcctccgcgctaactccgccgcccgctccccaggccgcccgcgctccccgcgcgcctcctcgggctccacgcgtcttgccccgcagaggcagcctcctccaggagcggggccctgcacaccatggcccccgggtgggcaggggtcggcgccgccgtgcgcgcccgcctggcgctggccttggcgctggcgagcgtcctgagtgggcctccagccgtcgcctgccccaccaagtgtacctgctccgctgccagcgtggactgccacgggctgggcctccgcgcggttcctcggggcatcccccgcaacgctgagcgccttgacctggacagaaataatatcaccaggatcaccaagatggacttcgctgggctcaagaacctccgagtcttgcatctggaagacaaccaggtcagcgtcatcgagagaggcgccttccaggacctgaagcagctagagcgactgcgcctgaacaagaataagctgcaagtccttccagaattgcttttccagagcacgccgaagctcaccagactagatttgagtgaaaaccagatccaggggatcccgaggaaggcgttccgcggcatcaccgatgtgaagaacctgcaactggacaacaaccacatcagctgcattgaagatggagccttccgagcgctgcgcgatttggagatccttaccctcaacaacaacaacatcagtcgcatcctggtcaccagcttcaaccacatgccgaagatccgaactctgcgcctccactccaaccacctgtactgcgactgccacctggcctggctctcggattggctgcgacagcgacggacagttggccagttcacactctgcatggctcctgtgcatttgaggggcttcaacgtggcggatgtgcagaagaaggagtacgtgtgcccagccccccactcggagcccccatcctgcaatgccaactccatctcctgcccttcgccctgcacgtgcagcaataacatcgtggactgtcgaggaaagggcttgatggagattcctgccaacttgccggagggcatcgtcgaaatacgcctagaacagaactccatcaaagccatccctgcaggagccttcacccagtacaagaaactgaagcgaatagacatcagcaagaatcagatatcggatattgctccagatgccttccagggcctgaaatcactcacatcgctggtcctgtatgggaacaagatcaccgagattgccaagggactgtttgatgggctggtgtccctacagctgctcctcctcaatgccaacaagatcaactgcctgcgggtgaacacgtttcaggacctgcagaacctcaacttgctctccctgtatgacaacaagctgcagaccatcagcaaggggctcttcgcccctctgcagtccatccagacactccacttagcccaaaacccatttgtgtgcgactgccacttgaagtggctggccgactacctccaggacaaccccatcgagacaagcggggcccgctgcagcagcccgcgccgactcgccaacaagcgcatcagccagatcaagagcaagaagttccgctgctcaggctccgaggattaccgcagcaggttcagcagcgagtgcttcatggacctcgtgtgccccgagaagtgtcgctgtgagggcacgattgtggactgctccaaccagaagctggtccgcatcccaagccacctccctgaatatgtcaccgacctgcgactgaatgacaatgaggtatctgttctggaggccactggcatcttcaagaagttgcccaacctgcggaaaataaatctgagtaacaataagatcaaggaggtgcgagagggagctttcgatggagcagccagcgtgcaggagctgatgctgacagggaaccagctggagaccgtgcacgggcgcgtgttccgtggcctcagtggcctcaaaaccttgatgctgaggagtaacttgatcggctgtgtgagtaatgacacctttgccggcctgagttcggtgagactgctgtccctctatgacaatcggatcaccaccatcacccctggggccttcaccacgcttgtctccctgtccaccataaacctcctgtccaaccccttcaactgcaactgccacctggcctggctcggcaagtggttgaggaagaggcggatcgtcagtgggaaccctaggtgccagaagccatttttcctcaaggagattcccatccaggatgtggccatccaggacttcacctgtgatggcaacgaggagagtagctgccagctgagcccgcgctgcccggagcagtgcacctgtatggagacagtggtgcgatgcagcaacaaggggctccgcgccctccccagaggcatgcccaaggatgtgaccgagctgtacctggaaggaaaccacctaacagccgtgcccagagagctgtccgccctccgacacctgacgcttattgacctgagcaacaacagcatcagcatgctgaccaattacaccttcagtaacatgtctcacctctccactctgatcctgagctacaaccggctgaggtgcatccccgtccacgccttcaacgggctgcggtccctgcgagtgctaaccctccatggcaatgacatttccagcgttcctgaaggctccttcaacgacctcacatctctttcccatctggcgctgggaaccaacccactccactgtgactgcagtcttcggtggctgtcggagtgggtgaaggcggggtacaaggagcctggcatcgcccgctgcagtagccctgagcccatggctgacaggctcctgctcaccaccccaacccaccgcttccagtgcaaagggccagtggacatcaacattgtggccaaatgcaatgcctgcctctccagcccgtgcaagaataacgggacatgcacccaggaccctgtggagctgtaccgctgtgcctgcccctacagctacaagggcaaggactgcactgtgcccatcaacacctgcatccagaacccctgtcagcatggaggcacctgccacctgagtgacagccacaaggatgggttcagctgctcctgccctctgggctttgaggggcagcggtgtgagatcaacccagatgactgtgaggacaacgactgcgaaaacaatgccacctgcgtggacgggatcaacaactacgtgtgtatctgtccgcctaactacacaggtgagctatgcgacgaggtgattgaccactgtgtgcctgagctgaacctctgtcagcatgaggccaagtgcatccccctggacaaaggattcagctgcgagtgtgtccctggctacagcgggaagctctgtgagacagacaatgatgactgtgtggcccacaagtgccgccacggggcccagtgcgtggacacaatcaatggctacacatgcacctgcccccagggcttcagtggacccttctgtgaacaccccccacccatggtcctactgcagaccagcccatgcgaccagtacgagtgccagaacggggcccagtgcatcgtggtgcagcaggagcccacctgccgctgcccaccaggtttcgccggccccagatgcgagaagctcatcactgtcaacttcgtgggcaaagactcctacgtggaactggcctccgccaaggtccgaccccaggccaacatctccctgcaggtggccactgacaaggacaacggcatccttctctacaaaggagacaatgaccccctggcactggagctgtaccagggccacgtgcggctggtctatgacagcctgagttcccctccaaccacagtgtacagtgtggagacagtgaatgatgggcagtttcacagtgtggagctggtgacgctaaaccagaccctgaacctagtagtggacaaaggaactccaaagagcctggggaagctccagaagcagccagcagtgggcatcaacagccccctctaccttggaggcatccccacctccaccggcctctccgccttgcgccagggcacggaccggcctctaggcggcttccacggatgcatccatgaggtgcgcatcaacaacgagctgcaggacttcaaggccctcccaccacagtccctgggggtgtcaccaggctgcaagtcctgcaccgtgtgcaagcacggcctgtgccgctccgtggagaaggacagcgtggtgtgcgagtgccgcccaggctggaccggcccactctgcgatcaggaggcccgggacccctgcctcggccacagatgccaccatggaaaatgtgtggcaactgggacctcatacatgtgcaagtgtgccgagggctatggaggggacttgtgtgacaacaagaatgactctgccaatgcctgctcagccttcaagtgtcaccatgggcagtgccacatctcagaccaaggggagccctactgcctgtgccagcccggctttagcggcgagcactgccaacaagagaatccgtgcctgggacaagtagtccgagaggtgatccgccgccagaaaggttatgcatcatgtgccacagcctccaaggtgcccatcatggaatgtcgtgggggctgtgggccccagtgctgccagcccacccgcagcaagcggcggaaatacgtcttccagtgcacggacggctcctcgtttgtagaagaggtggagagacacttagagtgcggctgcctcgcgtgttcctaagcccctgcccgcctgcctgccacctctcggactccagcttgatggagttgggacagccatgtgggaccccctggtgattcagcatgaaggaaatgaagctggagaggaaggtaaagaagaagagaatattaagtatattgtaaaataaacaaaaaatagaacttatttttattatggaaa

SEQ ID NO: 167 - DNA, 2720 bp, Homo sapiens
  Homo sapiens mRNA for endothelin-converting-enzyme 1
cgcccccccggtgtccgccctgctgtcggcgctggggatgtcgacgtacaagcgggccacgctggacgaggaggacctggtggactcgctctccgagggcgacgcataccccaacggcctgcaggtgaacttccacagcccccggagtggccagaggtgctgggctgcacggacccaggtggagaagcggctggtggtgttggtggtacttctggcggcaggactggtggcctgcttggcagcactgggcatccagtaccagacaagatccccctctgtgtgcctgagcgaagcttgtgtctcagtgaccagctccatcttgagctccatggaccccacagtggacccctgccatgacttcttcagctacgcctgtgggggctggatcaaggccaacccagtccctgatggccactcacgctgggggaccttcagcaacctctgggaacacaaccaagcaatcatcaagcacctcctcgaaaactccacggccagcgtgagcgaggcagagagaaaggcgcaagtatactaccgtgcgtgcatgaacgagaccaggatcgaggagctcagggccaaacctctaatggagttgattgagaggctcgggggctggaacatcacaggtccctgggccaaggacaacttccaggacaccctgcaggtggtcaccgcccactaccgcacctcacccttcttctctgtctatgtcagtgccgattccaagaactccaacagcaacgtgatccaggtggaccagtctggcctgggcttgccctcgagagactattacctgaacaaaactgaaaacgagaaggtgctgaccggatatctgaactacatggtccagctggggaagctgctgggcggcggggacgaggaggccatccggccccagatgcagcagatcttggactttgagacggcactggccaacatcaccatcccacaggagaagcgccgtgatgaggagctcatctaccacaaagtgacggcagccgagctgcagaccttggcacccgccatcaactggttgccttttctcaacaccatcttctaccccgtggagatcaatgaatccgagcctattgtggtctatgacaaggaataccttgagcagatctccactctcatcaacaccaccgacagatgcctgctcaacaactacatgatctggaacctggtgcggaaaacaagctccttccttgaccagcgctttcaggacgccgatgagaagttcatggaagtcatgtacgggaccaagaagacctgtcttcctcgctggaagttttgcgtgagtgacacagaaaacaacctgggctttgcgttgggccccatgtttgtcaaagcaaccttcgccgaggacagcaagagcatagccaccgagatcatcctggagattaagaaggcatttgaggaaagcctgagcaccctgaagtggatggatgaggaaacccgaaaatcagccaaggaaaaggccgatgccatctacaacatgataggataccccaacttcatcatggatcccaaggagctggacaaagtgtttaatgactacactgcagttccagacctctactttgaaaatgccatgcggtttttcaacttctcatggagggtcactgccgatcagctcaggaaagcccccaacagagatcagtggagcatgaccccgcccatggtgaacgcctactactcgcccaccaagaatgagattgtgtttccggccgggatcctgcaggcaccattctacacacgctcctcacccaaggccttaaactttggtggcataggtgtcgtcgtgggccatgagctgactcatgcttttgatgatcaaggacgggagtatgacaaggacgggaacctccggccatggtggaagaactcatccgtggaggccttcaagcgtcagaccgagtgcatggtagagcagtacagcaactacagcgtgaacggggagccggtgaacgggcggcacaccctgggggagaacatcgccgacaacgggggtctcaaggcggcctatcgggcttaccagaactgggtgaagaagaacggggctgagcactcgctccccaccctgggcctcaccaataaccagctcttcttcctgggctttgcacaggtctggtgctccgtccgcacacctgagagctcccacgaaggcctcatcaccgatccccacagcccctctcgcttccgggtcatcggctccctctccaattccaaggagttctcagaacacttccgctgcccacctggctcacccatgaacccgcctcacaagtgcgaagtctggtaaggacgaagcggagagagccaagacggaggaggggaaggggctgaggacgagacccccatccagcctccagggcattgctcagcccgcttggccacccggggccctgcttcctcacactggcgggttttcagccggaaccgagcccatggtgttggctctcaacgtgacccgcagtctgatcccctgtgaagagccggacatcccaggcacacgtgtgcgccaccttcagcaggcattcgggtgctgggctggtggctcatcaggcctgggccccacactgacaagcgccagatacgccacaaataccactgtgtcaaatgctttcaagatatatttttggggaaactattttttaaacactgtggaatacactggaaatcttcagggaaaaacacatttaaacacttttttttttaagccc

SEQ ID NO: 168 - DNA, 2814 bp, Homo sapiens
  Homo sapiens fibroblast activation protein, alpha (FAP), mRNA
aagaacgcccccaaaatctgtttctaattttacagaaatcttttgaaacttggcacggtattcaaaagtccgtggaaagaaaaaaaccttgtcctggcttcagcttccaactacaaagacagacttggtccttttcaacggttttcacagatccagtgacccacgctctgaagacagaattagctaactttcaaaaacatctggaaaaatgaagacttgggtaaaaatcgtatttggagttgccacctctgctgtgcttgccttattggtgatgtgcattgtcttacgcccttcaagagttcataactctgaagaaaatacaatgagagcactcacactgaaggatattttaaatggaacattttcttataaaacattttttccaaactggatttcaggacaagaatatcttcatcaatctgcagataacaatatagtactttataatattgaaacaggacaatcatataccattttgagtaatagaaccatgaaaagtgtgaatgcttcaaattacggcttatcacctgatcggcaatttgtatatctagaaagtgattattcaaagctttggagatactcttacacagcaacatattacatctatgaccttagcaatggagaatttgtaagaggaaatgagcttcctcgtccaattcagtatttatgctggtcgcctgttgggagtaaattagcatatgtctatcaaaacaatatctatttgaaacaaagaccaggagatccaccttttcaaataacatttaatggaagagaaaataaaatatttaatggaatcccagactgggtttatgaagaggaaatgcttcctacaaaatatgctctctggtggtctcctaatggaaaatttttggcatatgcggaatttaatgataaggatataccagttattgcctattcctattatggcgatgaacaatatcctagaacaataaatattccatacccaaaggctggagctaagaatcccgttgttcggatatttattatcgataccacttaccctgcgtatgtaggtccccaggaagtgcctgttccagcaatgatagcctcaagtgattattatttcagttggctcacgtgggttactgatgaacgagtatgtttgcagtggctaaaaagagtccagaatgtttcggtcctgtctatatgtgacttcagggaagactggcagacatgggattgtccaaagacccaggagcatatagaagaaagcagaactggatgggctggtggattctttgtttcaagaccagttttcagctatgatgccatttcgtactacaaaatatttagtgacaaggatggctacaaacatattcactatatcaaagacactgtggaaaatgctattcaaattacaagtggcaagtgggaggccataaatatattcagagtaacacaggattcactgttttattctagcaatgaatttgaagaataccctggaagaagaaacatctacagaattagcattggaagctatcctccaagcaagaagtgtgttacttgccatctaaggaaagaaaggtgccaatattacacagcaagtttcagcgactacgccaagtactatgcacttgtctgctacggcccaggcatccccatttccacccttcatgatggacgcactgatcaagaaattaaaatcctggaagaaaacaaggaattggaaaatgctttgaaaaatatccagctgcctaaagaggaaattaagaaacttgaagtagatgaaattactttatggtacaagatgattcttcctcctcaatttgacagatcaaagaagtatcccttgctaattcaagtgtatggtggtccctgcagtcagagtgtaaggtctgtatttgctgttaattggatatcttatcttgcaagtaaggaagggatggtcattgccttggtggatggtcgaggaacagctttccaaggtgacaaactcctctatgcagtgtatcgaaagctgggtgtttatgaagttgaagaccagattacagctgtcagaaaattcatagaaatgggtttcattgatgaaaaaagaatagccatatggggctggtcctatggaggatacgtttcatcactggcccttgcatctggaactggtcttttcaaatgtggtatagcagtggctccagtctccagctgggaatattacgcgtctgtctacacagagagattcatgggtctcccaacaaaggatgataatcttgagcactataagaattcaactgtgatggcaagagcagaatatttcagaaatgtagactatcttctcatccacggaacagcagatgataatgtgcactttcaaaactcagcacagattgctaaagctctggttaatgcacaagtggatttccaggcaatgtggtactctgaccagaaccacggcttatccggcctgtccacgaaccacttatacacccacatgacccacttcctaaagcagtgtttctctttgtcagactaaaaacgatgcagatgcaagcctgtatcagaatctgaaaaccttatataaacccctcagacagtttgcttattttattttttatgttgtaaaatgctagtataaacaaacaaattaatgttgttctaaaggctgttaaaaaaaagatgaggactcagaagttcaagctaaatattgtttacattttctggtactctgtgaaagaagagaaaagggagtcatgcattttgctttggacacagtgttttatcacctgttcatttgaagaaaaataataaagtcagaagttcaaaaaaaaaaaaaaaaaaaaaaaaagcggccgctcg

SEQ ID NO: 169 - DNA, 3410 bp, Homo sapiens
  Homo sapiens a disintegrin and metalloproteinase domain 10 (ADAM10), mRNA
gaattcgaggatccgggtaccatgggcggcggcaggcctagcagcacgggaaccgtcccccgcgcgcatgcgcgcgcccctgaagcgcctgggggacgggtatgggcgggaggtaggggcgcggctccgcgtgccagttgggtgcccgcgcgtcacgtggtgaggaaggaggcggaggtctgagtttcgagggagggggggagagaagagggaacgagcaagggaaggaaagcggggaaaggaggaaggaaacgaacgagggggagggaggtccctgttttggaggagctaggagcgttgccggcccctgaagtggagcgagagggaggtgcttcgccgtttctcctgccaggggaggtcccggcttcccgtggaggctccggaccaagccccttcagcttctccctccggatcgatgtgctgctgttaacccgtgaggaggcggcggcggcggcagcggcagcggaagatggtgttgctgagagtgttaattctgctcctctcctgggcggcggggatgggaggtcagtatgggaatcctttaaataaatatatcagacattatgaaggattatcttacaatgtggattcattacaccaaaaacaccagcgtgccaaaagagcagtctcacatgaagaccaatttttacgtctagatttccatgcccatggaagacatttcaacctacgaatgaagagggacacttcccttttcagtgatgaatttaaagtagaaacatcaaataaagtacttgattatgatacctctcatatttacactggacatatttatggtgaagaaggaagttttagccatgggtctgttattgatggaagatttgaaggattcatccagactcgtggtggcacattttatgttgagccagcagagagatatattaaagaccgaactctgccatttcactctgtcatttatcatgaagatgatattaactatccccataaatacggtcctcaggggggctgtgcagatcattcagtatttgaaagaatgaggaaataccagatgactggtgtagaggaagtaacacagatacctcaagaagaacatgctgctaatggtccagaacttctgaggaaaaaacgtacaacttcagctgaaaaaaatacttgtcagctttatattcagactgatcatttgttctttaaatattacggaacacgagaagctgtgattgcccagatatccagtcatgttaaagcgattgatacaatttaccagaccacagacttctccggaatccgtaacatcagtttcatggtgaaacgcataagaatcaatacaactgctgatgagaaggaccctacaaatcctttccgtttcccaaatattggtgtggagaagtttctggaattgaattctgagcagaatcatgatgactactgtttggcctatgtcttcacagaccgagattttgatgatggcgtacttggtctggcttgggttggagcaccttcaggaagctctggaggaatatgtgaaaaaagtaaactctattcagatggtaagaagaagtccttaaacactggaattattactgttcagaactatgggtctcatgtacctcccaaagtctctcacattacttttgctcacgaagttggacataactttggatccccacatgattctggaacagagtgcacaccaggagaatctaagaatttgggtcaaaaagaaaatggcaattacatcatgtatgcaagagcaacatctggggacaaacttaacaacaataaattctcactctgtagtattagaaatataagccaagttcttgagaagaagagaaacaactgttttgttgaatctggccaacctatttgtggaaatggaatggtagaacaaggtgaagaatgtgattgtggctatagtgaccagtgtaaagatgaatgctgcttcgatgcaaatcaaccagagggaagaaaatgcaaactgaaacctgggaaacagtgcagtccaagtcaaggtccttgttgtacagcacagtgtgcattcaagtcaaagtctgagaagtgtcgggatgattcagactgtgcaagggaaggaatatgtaatggcttcacagctctctgcccagcatctgaccctaaaccaaacttcacagactgtaataggcatacacaagtgtgcattaatgggcaatgtgcaggttctatctgtgagaaatatggcttagaggagtgtacgtgtgccagttctgatggcaaagatgataaagaattatgccatgtatgctgtatgaagaaaatggacccatcaacttgtgccagtacagggtctgtgcagtggagtaggcacttcagtggtcgaaccatcaccctgcaacctggatccccttgcaacgattttagaggttactgtgatgttttcatgcggtgcagattagtagatgctgatggtcctctagctaggcttaaaaaagcaatttttagtccagagctctatgaaaacattgctgaatggattgtggctcattggtgggcagtattacttatgggaattgctctgatcatgctaatggctggatttattaagatatgcagtgttcatactccaagtagtaatccaaagttgcctcctcctaaaccacttccaggcactttaaagaggaggagacctccacagcccattcagcaaccccagcgtcagcggccccgagagagttatcaaatgggacacatgagacgctaactgcagcttttgccttggttcttcctagtgcctacaatgggaaaacttcactccaaagagaaacctattaagtcatcatctccaaactaaaccctcacaagtaacagttgaagaaaaaatggcaagagatcatatcctcagaccaggtggaattacttaaattttaaagcctgaaaattccaatttgggggtgggaggtggaaaaggaacccaattttcttatgaacagatatttttaacttaatggcacaaagtcttagaatattattatgtgccccgtgttccctgttcttcgttgctgcattttcttcacttgcaggcaaacttggctctcaataaacttttaccacaaattgaaataaatatatttttttcaactgccaatcaaggctaggaggctcgaccacctcaacattggagacatcacttgccaatgtacataccttgttatatgcagacatgtatttcttacgtacactgtacttctgtgtgcaattgtaaacagaaattgcaatatggatgtttctttgtattataaaatttttccgctcttaattaaaaattactgtttaattgacatactcaggataacagagaatggtggtattcagtggtccaggattctgtaatgctttacacaggcagttttgaaatgaaaatcaatttaccccatggtacccggatcctcgaattc

SEQ ID NO: 170 - DNA, 3805 bp, Homo sapiens
  Homo sapiens EphB3 (EPHB3) mRNA
ggctcggctcctagagctgccacggccatggccagagcccgcccgccgccgccgccgtcgccgccgccggggcttctgccgctgctccctccgctgctgctgctgccgctgctgctgctgcccgccggctgccgggcgctggaagagaccctcatggacacaaaatgggtaacatctgagttggcgtggacatctcatccagaaagtgggtgggaagaggtgagtggctacgatgaggccatgaatcccatccgcacataccaggtgtgtaatgtgcgcgagtcaagccagaacaactggcttcgcacggggttcatctggcggcgggatgtgcagcgggtctacgtggagctcaagttcactgtgcgtgactgcaacagcatccccaacatccccggctcctgcaaggagaccttcaacctcttctactacgaggctgacagcgatgtggcctcagcctcctcccccttctggatggagaacccctacgtgaaagtggacaccattgcacccgatgagagcttctcgcggctggatgccggccgtgtcaacaccaaggtgcgcagctttgggccactttccaaggctggcttctacctggccttccaggaccagggcgcctgcatgtcgctcatctccgtgcgcgccttctacaagaagtgtgcatccaccaccgcaggcttcgcactcttccccgagaccctcactggggcggagcccacctcgctggtcattgctcctggcacctgcatccctaacgccgtggaggtgtcggtgccactcaagctctactgcaacggcgatggggagtggatggtgcctgtgggtgcctgcacctgtgccaccggccatgagccagctgccaaggagtcccagtgccgcccctgtccccctgggagctacaaggcgaagcagggagaggggccctgcctcccatgtccccccaacagccgtaccacctccccagccgccagcatctgcacctgccacaataacttctaccgtgcagactcggactctgcggacagtgcctgtaccaccgtgccatctccaccccgaggtgtgatctccaatgtgaatgaaacctcactgatcctcgagtggagtgagccccgggacctgggtgtccgggatgacctcctgtacaatgtcatctgcaagaagtgccatggggctggaggggcctcagcctgctcacgctgtgatgacaacgtggagtttgtgcctcggcagctgggcctgtcggagccccgggtccacaccagccatctgctggcccacacgcgctacacctttgaggtgcaggcggtcaacggtgtctcgggcaagagccctctgccgcctcgttatgcggccgtgaatatcaccacaaaccaggctgccccgtctgaagtgcccacactacgcctgcacagcagctcaggcagcagcctcaccctatcctgggcacccccagagcggcccaacggagtcatcctggactacgagatgaagtactttgagaagagcgagggcatcgcctccacagtgaccagccagatgaactccgtgcagctggacgggcttcggcctgacgcccgctatgtggtccaggtccgtgcccgcacagtagctggctatgggcagtacagccgccctgccgagtttgagaccacaagtgagagaggctctggggcccagcagctccaggagcagcttcccctcatcgtgggctccgctacagctgggcttgtcttcgtggtggctgtcgtggtcatcgctatcgtctgcctcaggaagcagcgacacggctctgattcggagtacacggagaagctgcagcagtacattgctcctggaatgaaggtttatattgacccttttacctacgaggaccctaatgaggctgttcgggagtttgccaaggagatcgacgtgtcctgcgtcaagatcgaggaggtgatcggagctggggaatttggggaagtgtgccgtggtcgactgaaacagcctggccgccgagaggtgtttgtggccatcaagacgctgaaggtgggctacaccgagaggcagcggcgggacttcctaagcgaggcctccatcatgggtcagtttgatcaccccaatataatccggctcgagggcgtggtcaccaaaagtcggccagttatgatcctcactgagttcatggaaaactgcgccctggactccttcctccggctcaacgatgggcagttcacggtcatccagctggtgggcatgttgcggggcattgctgccggcatgaagtacctgtccgagatgaactatgtgcaccgcgacctggctgctcgcaacatccttgtcaacagcaacctggtctgcaaagtctcagactttggcctctcccgcttcctggaggatgacccctccgatcctacctacaccagttccctgggcgggaagatccccatccgctggactgccccagaggccatagcctatcggaagttcacttctgctagtgatgtctggagctacggaattgtcatgtgggaggtcatgagctatggagagcgaccctactgggacatgagcaaccaggatgtcatcaatgccgtggagcaggattaccggctgccaccacccatggactgtcccacagcactgcaccagctcatgctggactgctgggtgcgggaccggaacctcaggcccaaattctcccagattgtcaataccctggacaagctcatccgcaatgctgccagcctcaaggtcattgccagcgctcagtctggcatgtcacagcccctcctggaccgcacggtcccagattacacaaccttcacgacagttggtgattggctggatgccatcaagatggggcggtacaaggagagcttcgtcagtgcggggtttgcatcttttgacctggtggcccagatgacggcagaagacctgctccgtattggggtcaccctggccggccaccagaagaagatcctgagcagtatccaggacatgcggctgcagatgaaccagacgctgcctgtgcaggtctgacaccggctcccacggggaccctgaggaccgtgcagggatgccaagcagccggctggactttcggactcttggacttttggatgcctggccttaggctgtggcccagaagctggaagtttgggaaaggcccaagctgggacttctccaggcctgtgttccctccccaggaagtgcgccccaaacctcttcatattgaagatggattaggagagggggtgatgacccctccccaagcccctcagggcccagaccttcctgctctccagcaggggatccccacaacctcacacttgtctgttcttcagtgctggaggtcctggcagggtcaggctggggtaagccggggttccacagggcccagccctggcaggggtctggccccccaggtaggcggagagcagtccctccctcaggaactggaggaggggactccaggaatggggaaatgtgacaccaccatcctgaagccagcttgcacctccagtttgcacagggatttgtcctgggggctgagggccctgtccccacccccgcccttggtgctgtcataaaagggcaggcaggggcaggctgaggagttgcccgttgccccccagagactgactctcagagccagagatgggatgtgtgagtgtgtgtgtgtgtgtgtgcgcgcgcgcgcgcgtgtgtgtgtgcacgcactggcctgcacagagagcatgggtgagcgtgtaaaagcttggccctgtgccctacagtggggacagctgggccgacagcagaataaaggcaataagatgaa

SEQ ID NO: 171 - DNA, 2359 bp, Homo sapiens
  Homo sapiens fibulin 1 (FBLN1), transcript variant D, mRNA
cccgccgcccatggagcgcgccgcgccgtcgcgccgggtcccgcttccgctgctgctgctcggcggccttgcgctgctggcggccggagtggacgcggatgtcctcctggaggcctgctgtgcggacggacaccggatggccactcatcagaaggactgctcgctgccatatgctacggaatccaaagaatgcaggatggtgcaggagcagtgctgccacagccagctggaggagctgcactgtgccacgggcatcagcctggccaacgagcaggaccgctgtgccacgccccacggtgacaacgccagcctggaggccacatttgtgaagaggtgctgccattgctgtctgctggggagggcggcccaggcccagggccagagctgcgagtacagcctcatggttggctaccagtgtggacaggtcttccgggcatgctgtgtcaagagccaggagaccggagatttggatgtcgggggcctccaagaaacggataagatcattgaggttgaggaggaacaagaggacccatatctgaatgaccgctgccgaggaggcgggccctgcaagcagcagtgccgagacacgggtgacgaggtggtctgctcctgcttcgtgggctaccagctgctgtctgatggtgtctcctgtgaagatgtcaatgaatgcatcacgggcagccacagctgccggcttggagaatcctgcatcaacacagtgggctctttccgctgccagcgggacagcagctgcgggactggctatgagctcacagaggacaatagctgcaaagatattgacgagtgtgagagtggtattcataactgcctccccgattttatctgtcagaatactctgggatccttccgctgccgacccaagctacagtgcaagagtggctttatacaagatgctctaggcaactgtattgatatcaatgagtgtttgagtatcagtgccccgtgccctattgggcatacatgcatcaacacagagggctcctacacgtgccagaagaacgtgcccaactgtggccgtggctaccatctcaacgaggagggaacgcgctgtgttgatgtggacgagtgcgcgccacctgctgagccctgtgggaagggacatcgctgcgtgaactctcccggcagtttccgctgcgaatgcaagacgggttactattttgacggcatcagcaggatgtgtgtcgatgtcaacgagtgccagcgctaccccgggcgcctgtgtggccacaagtgcgagaacacgctgggctcctacctctgcagctgttccgtgggcttccggctctctgtggatggcaggtcatgtgaagacatcaatgagtgcagcagcagcccctgtagccaggagtgtgccaacgtctacggctcctaccagtgttactgccggcgaggctaccagctcagcgatgtggatggagtcacctgtgaagacatcgacgagtgcgccctgcccaccgggggccacatctgctcctaccgctgcatcaacatccctggaagcttccagtgcagctgcccctcgtctggctacaggctggcccccaatggccgcaactgccaagacattgatgagtgtgtgactggcatccacaactgctccatcaacgagacctgcttcaacatccagggcgcgttccgctgcctggccttcgagtgccctgagaactaccgccgctccgcagccacgctccagcaggagaagacagacacggtccgctgcatcaagtcctgccgccccaacgatgtcacatgcgtgttcgaccccgtgcacaccatctcccacaccgtcatctcgctgcctaccttccgcgagttcacccgccctgaagagatcatcttcctccgggccatcacgccaccgcatcctgccagccaggctaacatcatcttcgacatcacggaagggaacctgcgggactcttttgacatcatcaagcgttacatggacggcatgaccgtgggtgtcgtgcgccaggtgcggcccatcgtgggcccatttcatgccgtcctgaagctggagatgaactatgtggtcgggggcgtggtttcccaccgaaatgttgtcaacgtccgcatcttcgtctctgagtactggttctgagggctggtctgccgcacagccgcaggtgcacctccaggccaaatcattgctgccagtgactgtggtctgtacttgtttataccctcagacttttttaatgttaggtatttgtagcataaggccaacatgtatcaagctgagccagatgaataagtccatctgatgtattttcggtgtttaaaaaatgagcccagttgctcaactgtttggttgaaaaccttgctcattttttaatgc

SEQ ID NO: 172 - DNA, 4364 bp, Homo sapiens
  Homo sapiens TYRO3 protein tyrosine kinase (TYRO3), mRNA
cattagatctttacatgaaagtaaaatttataagatttctagaaagtcaaaagatgataactatttcttaggatactaaaagcactcacattatagaaaaaaaatcagttaactatactccacaaacattaaaggctccctataaaaaaacatttttaataggcaagccacagaaagggcaaatattaatagtttgcaatacatatgtatgaaaaggaattgaatctagaatatttaacaaagctttacaactcaaaaaatacaaagaaaatatttttcttccaattggcaaattacttaaacagaaccttcacaaaagaagataagaatgtttaataaacatttgaagccataataatgacatcattagccatgatggaaatgcaaatttaagtaccacttcacatccacaagaaaaagataaaaataaaaggactgagctcaccaaacattggtgaggatgtggtaatactgaaattcttgtaccgtgctcctgagggtataacatattacaggatttttttgaaaactagtggttccttataaacttaatgccctggcaacctcacacctatttacttaagaatgaaagggccccgccctcctccctcctcgctcgcgggccgggcccggcatggtgcggcgtcgccgccgatggcgctgaggcggagcatggggcggccggggctcccgccgctgccgctgccgccgccaccgcggctcgggctgctgctggcggagtccgccgccgcaggtctgaagctcatgggagccccggtgaagctgacagtgtctcaggggcagccggtgaagctcaactgcagtgtggaggggatggaggagcctgacatccagtgggtgaaggatggggctgtggtccagaacttggaccagttgtacatcccagtcagcgagcagcactggatcggcttcctcagcctgaagtcagtggagcgctctgacgccggccggtactggtgccaggtggaggatgggggtgaaaccgagatctcccagccagtgtggctcacggtagaaggtgtgccatttttcacagtggagccaaaagatctggcagtgccacccaatgcccctttccaactgtcttgtgaggctgtgggtccccctgaacctgttaccattgtctggtggagaggaactacgaagatcgggggacccgctccctctccatctgttttaaatgtaacaggggtgacccagagcaccatgttttcctgtgaagctcacaacctaaaaggcctggcctcttctcgcacagccactgttcaccttcaagcactgcctgcagcccccttcaacatcaccgtgacaaagctttccagcagcaacgctagtgtggcctggatgccaggtgctgatggccgagctctgctacagtcctgtacagttcaggtgacacaggccccaggaggctgggaagtcctggctgttgtggtccctgtgcccccctttacctgcctgctccgggacctggtgcctgccaccaactacagcctcagggtgcgctgtgccaatgccttggggccctctccctatgctgactgggtgccctttcagaccaagggtctagccccagccagcgctccccaaaacctccatgccatccgcacagattcaggcctcatcttggagtgggaagaagtgatccccgaggcccctttggaaggccccctgggaccctacaaactgtcctgggttcaagacaatggaacccaggatgagctgacagtggaggggaccagggccaatttgacaggctgggatccccaaaaggacctgatcgtacgtgtgtgcgtctccaatgcagttggctgtggaccctggagtcagccactggtggtctcttctcatgaccgtgcaggccagcagggccctcctcacagccgcacatcctgggtacctgtggtccttggtgtgctaacggccctggtgacggctgctgccctggccctcatcctgcttcgaaagagacggaaagagacgcggtttgggcaagcctttgacagtgtcatggcccggggagagccagccgttcacttccgggcagcccggtccttcaatcgagaaaggcccgagcgcatcgaggccacattggacagcttgggcatcagcgatgaactaaaggaaaaactggaggatgtgctcatcccagagcagcagttcaccctgggccggatgttgggcaaaggagagtttggttcagtgcgggaggcccagctgaagcaagaggatggctcctttgtgaaagtggctgtgaagatgctgaaagctgacatcattgcctcaagcgacattgaagagttcctcagggaagcagcttgcatgaaggagtttgaccatccacacgtggccaaacttgttggggtaagcctccggagcagggctaaaggccgtctccccatccccatggtcatcttgcccttcatgaagcatggggacctgcatgccttcctgctcgcctcccggattggggagaacccctttaacctacccctccagaccctgatccggttcatggtggacattgcctgcggcatggagtacctgagctctcggaacttcatccaccgagacctggctgctcggaattgcatgctggcagaggacatgacagtgtgtgtggctgacttcggactctcccggaagatctacagtggggactactatcgtcaaggctgtgcctccaaactgcctgtcaagtggctggccctggagagcctggccgacaacctgtatactgtgcagagtgacgtgtgggcgttcggggtgaccatgtgggagatcatgacacgtgggcagacgccatatgctggcatcgaaaacgctgagatttacaactacctcattggcgggaaccgcctgaaacagcctccggagtgtatggaggacgtgtatgatctcatgtaccagtgctggagtgctgaccccaagcagcgcccgagctttacttgtctgcgaatggaactggagaacatcttgggccagctgtctgtgctatctgccagccaggaccccttatacatcaacatcgagagagctgaggagcccactgtgggaggcagcctggagctacctggcagggatcagccctacagtggggctggggatggcagtggcatgggggcagtgggtggcactcccagtgactgtcggtacatactcacccccggagggctggctgagcagccagggcaggcagagcaccagccagagagtcccctcaatgagacacagaggcttttgctgctgcagcaagggctactgccacacagtagctgttagcccacaggcagagggcatcggggccatttggccggctctggtggccactgagctggctgactaagccccgtctgaccccagcccagacagcaaggtgtggaggctcctgtggtagtcctcccaagctgtgctgggaagcccggactgaccaaatcacccaatcccagttcttcctgcaaccactctgtggccagcctggcatcagtttaggccttggcttgatggaagtgggccagtcctggttgtctgaacccaggcagctggcaggagtggggtggttatgtttccatggttaccatgggtgtggatggcagtgtggggagggcaggtccagctctgtgggccctaccctcctgctgagctgcccctgctgcttaagtgcatgcattgagctgcctccagcctggtggcccagctattaccacacttggggtttaaatatccaggtgtgcccctccaagtcagaaagagatgtccttgtaatattcccttttaggtgagggttggtaaggggttggtatctcaggtctgaatcttcaccatctttctgattccgcaccctgcctacgccaggagaagttgaggggagcatgcttccctgcagctgaccgggtcacacaaaggcatgctggagtacccagcctatcaggtgcccctcttccaaaggcagcgtgccgagccagcaagaggaaggggtgctgtgaggcttgcccaggagcaagtgaggccggagaggagttcaggaacccttctccatacccacaatctgagcacgctaccaaatctcaaaatatcctaagactaacaaaggcagctgtgtctgagcccaacccttctaaacggtgacctttagtgccaacttcccctctaactggacagcctcttctgtcccaagtctccagagagaaatcaggcctgatgagggggaattcctggaacctggaccccagccttggtgggggagcctctggaatgcatggggcgggtcctagctgttagggacatttccaagctgttagttgctgtttaaaatagaaataaaattgaagactaaagaccta

SEQ ID NO: 173 - DNA, 1768 bp, Homo sapiens
  Homo sapiens carcinoembryonic antigen-related cell adhesion molecule 1 (biliary glycoprotein) (CEACAM1), mRNA
ggaaaacagcagaggtgacagagcagccgtgctcgaagcgttcctggagcccaagctctcctccacaggtgaagacagggccagcaggagacaccatggggcacctctcagccccacttcacagagtgcgtgtaccctggcaggggcttctgctcacagcctcacttctaaccttctggaacccgcccaccactgcccagctcactactgaatccatgccattcaatgttgcagaggggaaggaggttcttctccttgtccacaatctgccccagcaactttttggctacagctggtacaaaggggaaagagtggatggcaaccgtcaaattgtaggatatgcaataggaactcaacaagctaccccagggcccgcaaacagcggtcgagagacaatataccccaatgcatccctgctgatccagaacgtcacccagaatgacacaggattctacaccctacaagtcataaagtcagatcttgtgaatgaagaagcaactggacagttccatgtatacccggagctgcccaagccctccatctccagcaacaactccaaccctgtggaggacaaggatgctgtggccttcacctgtgaacctgagactcaggacacaacctacctgtggtggataaacaatcagagcctcccggtcagtcccaggctgcagctgtccaatggcaacaggaccctcactctactcagtgtcacaaggaatgacacaggaccctatgagtgtgaaatacagaacccagtgagtgcgaaccgcagtgacccagtcaccttgaatgtcacctatggcccggacacccccaccatttccccttcagacacctattaccgtccaggggcaaacctcagcctctcctgctatgcagcctctaacccacctgcacagtactcctggcttatcaatggaacattccagcaaagcacacaagagctctttatccctaacatcactgtgaataatagtggatcctatacctgccacgccaataactcagtcactggctgcaacaggaccacagtcaagacgatcatagtcactggtaagtaattcctggagcatcaacactaagatctggggtacaagctttctggttttcaaataggagcagagaagaaattttcttttgcagcctgtatccaacaggcacaaacaagtccaaattctcccctgaaccctctcaattcatctgtgcagactctcttccctttgtttttctgatttctcacagctgaccttaggtccagcctggaatgtggggagggggttctctcagccccagaaagccccgtgtagcaggaggggcttcacagagggggaagcagaaagggtcctcaaggtcaatttgcttctgtcactaacatgtccctttctgtaacttcttggccttcttttacctattccatgagatataaggaatatgtgaggttttaaaacagactcacaatagttttccctaaatgagagaaggaaatgcccttcatcagggatgagcagctcagactctgctccctgctctactcccggcttgcccggtgattggctctgccctgatcccatgtggggtaggacgcaggtgtgtgcagaaggtgtccaggtggcctgtcatgaatccagctaaatcaagatggcagtcaatggctgggcgctgtggttcatgcctgtgatcccagtactttggaaggccgaggtgagaggatcacctgaggtcaggagttcgagaccagcctgaccaacatggcaaaactccatctcta

SEQ ID NO: 174 - DNA, 3431 bp, Homo sapiens
  Homo sapiens elastin microfibril interface located protein (EMILIN), mRNA
atggccccccgcaccctctggagctgctacctctgctgcctgctgacggcagctgcaggggccgccagctaccctcctcgaggtttcagcctctacacaggttccagtggggccctcagccccggggggccccaggcccagattgccccccggccagccagccgccacaggaactggtgtgcctacgtggtgacccggacagtgagctgtgtccttgaggatggagtggagacatatgtcaagtaccagccttgtgcctggggccagccccagtgtccccaaagcatcatgtaccgccgcttcctccgccctcgctaccgtgtggcctacaagacagtgaccgacatggagtggaggtgctgtcagggttatgggggcgatgactgtgctgagagtcccgctccagcgctggggcctgcgtcttccacaccacggcccctggcccggcctgcccgccccaacctctctggctccagtgcaggcagccccctcagtggactggggggagaaggtcctggggagtcagagaaggtgcagcagctggaggaacaggtgcagagcctgaccaaggagctgcaaggcctgcggggcgtcctgcaaggactgagcgggcgcctggcagaggatgtgcagagggctgtggagacggccttcaacgggaggcagcagccagctgacgcggctgcccgccctggggtgcatgaaaccctcaatgagatccagcaccagctgcagctcctggacacccgcgtctccacccacgaccaggagctgggtcacctcaacaaccatcatggcggcagcagcagcagtgggggcagcagggccccagccccagcctcagcccctccgggccccagtgaggagctgctgcggcagctggagcagcggttgcaggagtcctgctccgtgtgcctggccgggctagatggcttccgccggcagcagcaggaggacagggagcggctgcgagcgatggagaagctgctggcctcggtggaggagcggcaacggcacctcgcagggctggcggtgggccgcaggccccctcaggaatgctgctctccagagctgggccggcgactggcagagctggagcgcaggctggatgtcgtggccggctcagtgacagtgctgagtgggcggcgaggcacagagctgggaggagccgcggggcagggaggccaccccccaggctacaccagcttggcctcccgcctgtctcgcctggaggaccgcttcaactccaccctgggcccttcggaggagcaggaggagagctggcctggggctcctggggggctgagccactggctgcctgctgcccggggccgactagagcagttgggggggctgctggccaatgtgagcggggagctgggggggcggttggatctgttggaggagcaggtggcaggggccatgcaggcatgcgggcagctctgctctggggcccctggggagcaggactctcaagtcagcgagatcctcagtgccttggagcgcagggtgctggacagtgaggggcagctgcggctggtgggctccggcctgcacacggtggaagcagcgggggaggcccggcaggccacgctggagggattacaagaggttgtgggccggctccaggatcgtgtggatgcccaggatgagacagctgcagagttcacactacggctgaatctcactgcggcccggctaggccaactggaggggctgctgcaggcccatggggatgagggctgtggggcctgtggcggagtccaagaggaactaggccgccttcgggatggtgtggagcgctgctcctgccccctgttgcctcctcggggtcctggggctggtccaggtgttgggggcccaagccgtgggcccctggacggcttcagcgtgtttgggggcagctcaggctcagccctgcaggccctgcaaggagagctctctgaggttattctcagcttcagctccctcaatgactcactgaatgagctccagaccactgtggagggccagggcgctgatctggctgacctgggggcaaccaaggaccgtatcatttctgagattaacaggctgcagcaggaggccacagagcatgctacagagagtgaagagcgcttccgaggcctagaggagggacaagcacaggccggccagtgccccagcttagaggggcgattgggccgtcttgagggtgtctgtgaacggttggacactgtggctgggggactgcagggcctgcgcgagggcctttccagacacgtggctgggctctgggctgggctccgggaaaccaacaccaccagccagatgcaggcagccctgctggagaagctggtcgggggacaggcgggcctgggcaggcggctgggtgcccttaacagctccctgcagctcctggaggaccgtctgcaccagctcagcctgaaggacctcactgggcctgcaggagaggctgggcccccagggcctcctgggctgcagggacccccaggccctgctggacctccaggatcaccaggcaaggacgggcaagagggccccatcgggccaccaggtcctcaaggggaacagggagtggagggggcaccagcagcccctgtgccccaagtggcattttcagctgctctgagtttgccccggtctgaaccaggcacggtccccttcgacagagtcctgctcaatgatggaggctattatgatccagagacaggcgtgttcacagcgccactggctggacgctacttgctgagcgcggtgctgactgggcaccggcacgagaaagtggaggccgtgctgtcccgctccaaccagggcgtggcccgcgtagactccggtggctacgagcctgagggcctggagaataagccggtggccgagagccagcccagcccgggcaccctgggcgtcttcagcctcatcctgccgctgcaggccggggacacggtctgcgtcgacctggtcatggggcagctggcgcactcggaggagccgctcaccatcttcagcggggccctgctctatggggacccagagcttgaacacgcgtagactggggtcccgcccgacgtgtctacgtcggctgaagagacagcgggggcggcgggctcctggggtctcgcctgagacggggcacctagccctgggcgagcgccgcacccgggcccgcagcggcaccgcgcccagagcggcctctccccacgcccggggcgcgccggctcagggaggctcggggccgcccatgcagacttttggcctggcgcgatcccccaagaacccctccagggccggcctgcggaggagccgatcctcgcaccctccgctccctccactggccctccaggtcgattccctgggctccaggctcccccgcgcgggcgccgcccaccgccatactaaacgatcgaggaataaagacacttggtttttct

SEQ ID NO: 175 - DNA, 2921 bp, Homo sapiens
  Homo sapiens CD97 antigen (CD97), mRNA
agcctgtggagacgggacagccctgtcccactcactctttcccctgccgctcctgccggcagctccaaccatgggaggccgcgtctttctcgcattctgtgtctggctgactctgccgggagctgaaacccaggactccaggggctgtgcccggtggtgccctcagaactcctcgtgtgtcaatgccaccgcctgtcgctgcaatccagggttcagctctttttctgagatcatcaccaccccgacggagacttgtgacgacatcaacgagtgtgcaacaccgtcgaaagtgtcatgcggaaaattctcggactgctggaacacagaggggagctacgactgcgtgtgcagcccgggatatgagcctgtttctggggcaaaaacattcaagaatgagagcgagaacacctgtcaagatgtggacgagtgcagctccgggcagcatcagtgtgacagctccaccgtctgcttcaacaccgtgggttcatacagctgccgctgccgcccaggctggaagcccagacacggaatcccgaataaccaaaaggacactgtctgtgaagatatgactttctccacctggaccccgccccctggagtccacagccagacgctttcccgattcttcgacaaagtccaggacctgggcagagactccaagacaagctcagccgaggtcaccatccagaatgtcatcaaattggtggatgaactgatggaagctcctggagacgtagaggccctggcgccacctgtccggcacctcatagccacccagctgctctcaaaccttgaagatatcatgaggatcctggccaagagcctgcctaaaggccccttcacctacatttccccttcgaacacagagctgaccctgatgatccaggagcggggggacaagaacgtcactatgggtcagagcagcgcacgcatgaagctgaattgggctgtggcagctggagccgaggatccaggccccgccgtggcgggcatcctctccatccagaacatgacgacattgctggccaatgcctccttgaacctgcattccaagaagcaagccgaactggaggagatatatgaaagcagcatccgtggtgtccaactcagacgcctctctgccgtcaactccatctttctgagccacaacaacaccaaggaactcaactcccccatccttttcgccttctcccaccttgagtcctccgatggggaggcgggaagagaccctcctgccaaggacgtgatgcctgggccacggcaggagctgctctgtgccttctggaagagtgacagcgacaggggagggcactgggccaccgaggtctgccaggtgctgggcagcaagaacggcagcaccacctgccaatgcagccacctgagcagctttacgatccttatggctcattatgacgtggaggactggaagctgaccctgatcaccagggtgggactggcgctgtcactcttctgcctgctgctgtgcatcctcactttcctgctggtgcggcccatccagggctcgcgcaccaccatacacctgcacctctgcatctgcctcttcgtgggctccaccatcttcctggccggcatcgagaacgaaggcggccaggtggggctgcgctgccgcctggtggccgggctgctgcactactgtttcctggccgccttctgctggatgagcctcgaaggcctggagctctactttcttgtggtgcgcgtgttccaaggccagggcctgagtacgcgctggctctgcctgatcggctatggcgtgcccctgctcatcgtgggcgtctcggctgccatctacagcaagggctacggccgccccagatactgctggttggactttgagcagggcttcctctggagcttcttgggacctgtgaccttcatcattttgtgcaatgctgtcattttcgtgactaccgtctggaagctcactcagaagttttctgaaatcaatccagacatgaagaaattaaagaaggcgagggcgctgaccatcacggccatcgcgcagctcttcctgttgggctgcacctgggtctttggcctgttcatcttcgacgatcggagcttggtgctgacctatgtgtttaccatcctcaactgcctgcagggcgccttcctctacctgctgcactgcctgctcaacaagaaggttcgggaagaataccggaagtgggcctgcctagttgctggggggagcaagtactcagaattcacctccaccacgtctggcactggccacaatcagacccgggccctcagggcatcagagtccggcatatgaaggcgcatggttctggacggcccagcagctcctgtggccacagcagctttgtacacgaagaccatccatcctcccttcgtccaccactctactccctccaccctccctccctgatcccgtgtgccaccaggagggagtggcagctatagtctggcaccaaagtccaggacacccagtggggtggagtcggagccactggtcctgctgctggctgcctctctgctccaccttgtgacccagggtggggacaggggctggcccagggctgcaatgcagcatgttgccctggcacctgtggccagtactcgggacagactaagggcgcttgtcccatcctggacttttcctctcatgtctttgctgcagaactgaagagactaggcgctggggctcagcttccctcttaagctaagactgatgtcagaggccccatggcgaggccccttggggccactgcctgaggctcacggtacagaggcctgccctgcctggccgggcaggaggttctcactgttgtgaaggttgtagacgttgtgtaatgtgtttttatctgttaaaatttttcagtgttgacacttaaaattaaacacatgcatacagaaaaaaaaaaaaaaaaaaaaaa

SEQ ID NO: 176 - DNA, 2163 bp, Homo sapiens
  Homo sapiens chloride channel Kb (CLCNKB), mRNA
cggcagccacagcaggaggactgacaggggcctgatggaggagtttgtggggctgcgtgaaggctcctcagggaaccctgtgactctgcaggagctgtggggcccctgtcccctcatccgccgaggcatccgaggtggcctggagtggctgaagcagaagctcttccgcctgggcgaggactggtacttcctgatgaccctcggggtgctcatggccctggtcagctgtgccatggacttggctgttgagagtgtggtccgagcgcaccagtggctgtacagggagattggggacagccacctgctccggtatctctcctggactgtgtaccctgtggccctcgtctctttctcttcgggcttctctcagagcatcacaccctcctctggaggttctggaatcccggaggtgaagaccatgttggcgggtgtggtcttggaggactacctggatatcaagaactttggggccaaagtggtgggcctctcctgcaccctggcctgtggcagcaccctcttcctcggcaaagtgggccctttcgtgcacctgtctgtgatgatggctgcctacctgggccgtgtgcgcaccacgaccatcggggagcctgagaacaagagcaagcaaaacgaaatgctggtggcagcggcggcagtgggcgtggccacagtctttggcgctcccttcagcggcgtcctgttcagcatcgaggtcatgtcttcccacttctctgtctgggattactggaggggcttctttgcggccacctgcggggccttcatgttccggctcctggcggtcttcaacagcgagcaggagaccatcacctccctctacaagaccagtttccgggtggacgttcccttcgacctgcctgagatcttcttttttgtggtgctggggggtctctgcggcatcctgggcagcgcttacctcttctgtcagcgaatcttctttggcttcatcaggaacaataggttcagctccaaactgctggccaccagcaagcctgtgtactccgctctggccaccttggttctcgcctccatcacctacccacccagcgccggccgcttcctagcttctcggctgtccatgaagcagcatctggactcgctgttcgacaaccactcctgggcgctgatgacccagaactccagcccaccctggcccgaggagctcgacccccagcacctgtggtgggaatggtaccacccgcggttcaccatctttgggacccttgccttcttcctggttatgaagttctggatgctgattctggccaccaccatccccatgcctgccgggtacttcatgcccatctttgtctatggagctgctatcgggcgcctctttggggagactctctcttttatcttccctgagggcatcgtggctggagggatcaccaatcccatcatgccaggggggtatgctctggcaggggctgcagccttctcaggggctgtgacccacaccatctccacggcgctgctggccttcgaggtgaccggccagatagtgcatgcactgcccgtgctgatggcggtgctggcagccaacgccattgcacagagctgccagccctccttctatgatggcaccgtcattgtcaagaagctgccatacctgccacggattctgggccgcaacatcggttcccaccgcgtgagggtggagcacttcatgaaccacagcatcaccacactggccaaggacacgccactggaggaggtggtcaaggttgtgacctccacagacgtggccgagtatcccttggtggagagcacagagtcccagatcctggtgggcatagtgcgaagggcccagctggtgcaggccctgaaggctgagcctccttcctgggctcctggacaccagcagtgtctccaggacatcttggctgcaggctgccccacagaaccagtgaccctgaagctgtccccagagacttccctgcatgaggcacacaacctctttgagctgttgaaccttcattccctctttgtgacgtcgcggggcagagctgtgggctgcgtgtcctgggtggagatgaagaaagcaatttccaacctgacaaatccgccagccccaaagtgagccggcccagcaagatgaaacagggcaccccagctgccctggtactgaggttgggctgagaccct

SEQ ID NO: 177 - DNA, 7392 bp, Homo sapiens
  Homo sapiens frizzled (Drosophila) homolog 4 (FZD4), mRNA
  modified_base (7110): a, c, g, t, other or unknown
gctgcgcagcgctggctgctggctggcctcgcggagacgccgaacggacgcggccggcgccggcttgtgggctcgccgcctgcagccatgaccctcgcagcctgtccctcggcctcggcccgggacgtctaaaatcccacacagtcgcgcgcagctgctggagagccggccgctgccccctcgtcgccgcatcacactcccgtcccgggagctgggagcagcgcgggcagccggcgcccccgtgcaaactgggggtgtctgccagagcagccccagccgctgccgctgctacccccgatgctggccatggcctggcggggcgcagggccgagcgtcccgggggcgcccgggggcgtcggtctcagtctggggttgctcctgcagttgctgctgctcctggggccggcgcggggcttcggggacgaggaagagcggcgctgcgaccccatccgcatctccatgtgccagaacctcggctacaacgtgaccaagatgcccaacctggttgggcacgagctgcagacggacgccgagctgcagctgacaactttcacaccgctcatccagtacggctgctccagccagctgcagttcttcctttgttctgtttatgtgccaatgtgcacagagaagatcaacatccccattggcccatgcggcggcatgtgtctttcagtcaagagacgctgtgaacccgtcctgaaggaatttggatttgcctggccagagagtctgaactgcagcaaattcccaccacagaacgaccacaaccacatgtgcatggaagggccaggtgatgaagaggtgcccttacctcacaaaacccccatccagcctggggaagagtgtcactctgtgggaaccaattctgatcagtacatctgggtgaaaaggagcctgaactgtgtgctcaagtgtggctatgatgctggcttatacagccgctcagccaaggagttcactgatatctggatggctgtgtgggccagcctgtgtttcatctccactgccttcacagtactgaccttcctgatcgattcttctaggttttcctaccctgagcgccccatcatatttctcagtatgtgctataatatttatagcattgcttatattgtcaggctgactgtaggccgggaaaggatatcctgtgattttgaagaggcagcagaacctgttctcatccaagaaggacttaagaacacaggatgtgcaataattttcttgctgatgtacttttttggaatggccagctccatttggtgggttattctgacactcacttggtttttggcagcaggactcaaatggggtcatgaagccattgaaatgcacagctcttatttccacattgcagcctgggccatccccgcagtgaaaaccattgtcatcttgattatgagactggtggatgcagatgaactgactggcttgtgctatgttggaaaccaaaatctcgatgccctcaccgggttcgtggtggctcccctctttacttatttggtcattggaactttgttcattgctgcaggtttggtggccttgttcaaaattcggtcaaatcttcaaaaggatgggacaaagacagacaagttagaaagactgatggtcaagattggggtgttctcagtactgtacacagttcctgcaacgtgtgtgattgcctgttatttttatgaaatctccaactgggcactttttcggtattctgcagatgattccaacatggctgttgaaatgttgaaaacttttatgtctttgttggtgggcatcacttcaggcatgtggatttggtctgccaaaagtcttcacacgtggcagaagtgttccaacagattggtgaattctggaaaggtaaagagagagaagagaggaaatggttgggtgaagcctggaaaaggcagtgagactgtggtataaggctagtcagcctccatgctttcttcattttgaaggggggaatgccagcattttggaggaaattctactaaaagttttatgcagtgaatctcagtttgaacaaactagcaacaattaagtgacccccgtcaacccactgcctcccaccccgaccccagcatcaaaaaaccaatgattttgctgcagactttggaatgatccaaaatggaaaagccagttagaggctttcaaagctgtgaaaaatcaaaacgttgatcactttagcaggttgcagcttggagcgtggaggtcctgcctagattccaggaagtccagggcgatactgttttcccctgcagggtgggatttgagctgtgagttggtaactagcagggagaaatattaacttttttaaccctttaccattttaaatactaactgggtctttcagatagcaaagcaatctataaacactggaaacgctgggttcagaaaagtgttacaagagttttatagtttggctgatgtaacataaacatcttctgtggtgcgctgtctgctgtttagaactttgtggactgcactcccaagaagtggtgttagaatctttcagtgcctttgtcataaaacagttatttgaacaaacaaaagtactgtactcacacacataaggtatccagtggatttttcttctctgtcttcctctcttaaatttcaacatctctcttcttggctgctgctgttttcttcattttatgttaatgactcaaaaaaggtatttttatagaatttttgtactgcagcatgcttaaagaggggaaaaggaagggtgattcactttctgacaatcacttaattcagaggaaaatgagatttactaagttgacttacctgacggaccccagagacctattgcattgagcagtggggacttaatatattttacttgtgtgattgcatctatgcagacgccagtctggaagagctgaaatgttaagtttcttggcaactttgcattcacacagattagctgtgtaatttttgtgtgtcaattacaattaaaagcacattgttggaccatgacatagtatactcaactgactttaaaactatggtcaacttcaacttgcattctcagaatgatagtgcctttaaaatttttttattttttaaagcataagaatgttatcagaatctggtctacttaggacaatggagactttttcagttttataaagggaactgaggacagctaatccaactacttggtgctgtaattgtttcctagtaattggcaaaggctccttgtaagatttcactggaggcagtgtggcctggagtatttatatggtgcttaatgaatctccagaatgccagccagaagcctgattggttagtagggaataaagtgtagaccatatgaaatgaactgcaaactctaatagcccaggtcttaattgcctttagcagaggtatccaaagcttttaaaatttatgcatacgttcttcacaagggggtacccccagcagcctctcgaaaattgcacttctcttaaaactgtaactggcctttctcttaccttgccttaggccttctaatcatgagatcttggggacaaattgactatgtcacaggttgctctccttgtaactcatacctgtctgcttcagcaactgctttgcaatgacatttatttattaattcatgccttaaaaaaataggaagggaagcttttttttttctttttttttttttcaatcacactttgtggaaaaacatttccagggactcaaaattccaaaaaggtggtcaaattctggaagtaagcatttcctcttttttaaaaatttggtttgagccttatgcccatagtttgacatttccctttcttctttcctttttgtttttgtgtggttcttgagctctctgacatcaagatgcatgtaaagtcgattgtatgttttgaaggcaaagtcttggcttttgagactgaagttaagtgggcacaggtggcccctgctgctgtgcccagtctgagtaccttggctagactctaggtcaggctccaggagcatgagaattgatccccagaagaaccattttaactccatctgatactccattgcctatgaaatgtaaaatgtgaactccctgtgctgcttgtagacagttcccataactgtccacggccctggagcacgcacccaggggcagagcctgcccttactcacgctctgctctggtgtcttgggagttgtgcagggactctggcccaggcaggggaaggaagaccaggcggtaggggactggtcttgctgttagagtatagaggtttgtaatgcagttttcttcataatgtgtcagtgattgtgtgaccaaggcagcatctagcagaaagccaggcatggagtaggtgatcgatacttgtcaatgactaaataataacaataaaagagcacttgggtgaatctgggcacctgatttctgagttttgagttctggagctagtgttttgacaatgctttgggttttgacatgccttttccacaaatctcttgccttttcagggcaaagtgtatttgatcagaagtggccatttggattagtagccttagcaatgctacagggttataggcccctctccctttcacattccagacaatggagagtgtttatggtttcaggaaaagaactttgtggctgaggggtcagttaccagtgaccttcaatcaactccatcacttcttaaatcggtatttgttaaaaaaatcagttattttatttattgagtgccgactgtagtaaagccctgaaatagataatctctgttcttctaactgatctaggatggggacgcacccaggtctgctgaactttactgttcctctgggaaaggagcagggacctctggaattcccatctgtttcactgtctccattccataaatctcttcctgtgtgagccaccacacccagcctgggtctctctacttttaacacatctctcatccctttcccaggacttccttccaagtcagttacaggtggttttaacagaaagcatcagctctgcttcgtgacagtctctggagaaatcccttaggaagactatgagagtaggccacaaggacatgggcccacacatctgctttggctttgccggcaattcagggcttggggtattccatgtgacttgtataggtatatttgaggacagcatcttgctagagaaaaggtgagggttgtttttctttctctgaaacctacagtaaatgggtatgattgtagcttcctcagaaatcccttggcctccagagattaaacatggtgcaatggcacctctgtccaacctcctttctggtagattcctttctcctgcttcatataggccaaacctcagggcaagggaacatgggggtagagtggtgctggccagaaccatctgcttgagctacttggttgattcatatcctctttcctttatggagacccatttcctgatctctgagactgttgctgaactggcaacttacttgggcctgaaactggagaaggggtgacatttttttaatttcagagatgctttctgattttcctctcccaggtcactgtctcacctgcactctccaaactcaggttccgggaagcttgtgtgtctagatactgaattgagattctgttcagcaccttttagctctatactctctggctcccctcatcctcatggtcactgaattaaatgcttattgtattgagaaccaagatgggacctgaggacacaaagatgagctcaacagtctcagccctagaggaatagactcagggatttcaccaggtcggtgcagtatttgatttctggtgaggtgaccacagctgcagttaggaagggagccattgagcacagactttggaaggaaccttttttttgttgtttgtttgtttgtttgtttgtttgtttgtttgagacagggtcttgctctgctacccaggctggggcgcaatggcacgatcttggctcactgcaacctctgcctcctgggttcaagtgattctcctgccacagcctcctgaggagctgggactacaggtgcgtgctaccacgcccagctacttctgtatttttagtagagacggggtttcactgtgttggccaggctggtctcgaactcctgacctcatgatctgcccgcctcagcctcccaaagtgctgggattacaagtgtgagccaccacacctggcctggaaggaacctcttaaaatcagtttacgtcttgtattttgttctgtgatggaggacactggagagagttgctattccagtcaatcatgtcgagtcactggactctgaaaatcctattggttcctttattttatttgagtttagagttcccttctgggtttgtattatgtctggcaaatgacctgggttatcacttttcctccagggttagatcatagatcttggaaactccttagagagcattttgctcctaccaaggatcagatactggagccccacataatagatttcatttcactctagcctacatagagctttctgttgctgtctcttgccatgcacttgtgcggtgattacacacttgacagtaccaggagacaaatgacttacagatcccccgacatgcctcttccccttggcaagctcagttgccctgatagtagcatgtttctgtttctgatgtaccttttttctcttcttctttgcatcagccaattcccagaatttccccaggcaatttgtagaggacctttttggggtcctatatgagccatgtcctcaaagcttttaaacctccttgctctcctacaatattcagtacatgaccactgtcatcctagaaggcttctgaaaagaggggcaagagccactctgcgccacaaaggttggatccatcttctctccgaggttgtgaaagttttcaaattgtactaataggctggggccctgacttggctgtgggctttgggaggggtaagctgctttctagatctctcccagtgaggcatggaggtgtttctgaattttgtctacctcacagggatgttgtgaggcttgaaaaggtcaaaaaatgatggccccttgagctctttgtaagaaaggtagatgaaatatcggatgtaatctgaaaaaaagataaaatgtgacttcccctgctctgtgcagcagtcgggctggatgctctgtggcntttcttgggtcctcatgccaccccacagctccaggaaccttgaagccaatctggggactttcagatgtttgacaaagaggtaccaggcaaacttcctgctacacatgccctgaatgaattgctaaatttcaaaggaaatggaccctgcttttaaggatgtacaaaagtatgtctgcatcgatgtctgtactgtaaatttctaatttatcactgtacaaagaaaaccccttgctatttaattttgtattaaaggaaaataaagttttgtttgttaaaaaaaaa

SEQ ID NO: 178 - DNA, 3375 bp, Homo sapiens
  Homo sapiens frizzled (Drosophila) homolog 3 (FZD3), mRNA
gccgctccgggtacctgagggacgcgcggccgcccgcggcaggcggtgcagcccccccccaccccttggagccaggcgccggggtctgaggatagcatttctcaagacctgacttatggagcacttgtaacctgagatatttcagttgaaggaagaaatagctcttctcctaagatggaatctgtggtttgggaatgtggttgatcaacttgatatgttggccaaatgtgccccatgtaataaaatgaaaagaagagacaagatgatgtcattttcccatattgtgaaaccaaaaacaaacgccttttgtgagaccaagctaacaaacctctgacggtgcgaagagtatttaactgtttgaagaatttaacagtaagatacagaagaagtaccttcgagctgagacctgcaggtgtataaatatctaaaatacatattgaataggcctgatcatctgaatctccttcagacccaggaaggatggctatgacttggattgtcttctctctttggcccttgactgtgttcatggggcatataggtgggcacagtttgttttcttgtgaacctattaccttgaggatgtgccaagatttgccttataatactaccttcatgcctaatcttctgaatcattatgaccaacagacagcagctttggcaatggagccattccaccctatggtgaatctggattgttctcgggatttccggccttttctttgtgcactctacgctcctatttgtatggaatatggacgtgtcacacttccctgtcgtaggctgtgtcagcgggcttacagtgagtgttcgaagctcatggagatgtttggtgttccttggcctgaagatatggaatgcagtaggttcccagattgtgatgagccatatcctcgacttgtggatctgaatttagctggagaaccaactgaaggagccccagtggcagtgcagagagactatggtttttggtgtccccgagagttaaaaattgatcctgatctgggttattcttttctgcatgtgcgtgattgttcacctccttgtccaaatatgtacttcagaagagaagaactgtcatttgctcgctatttcataggattgatttcaatcatttgcctctcggccacattgtttacttttttaacttttttgattgatgtcacaagattccgttatcctgaaaggcctattatattttatgcagtctgctacatgatggtatccttaattttcttcattggatttttgcttgaagatcgagtagcctgcaatgcatccatccctgcacaatataaggcttccacagtgacacaaggatctcataataaagcctgtaccatgctttttatgatactctatttttttactatggctggcagtgtatggtgggtaattcttaccatcacatggtttttagcagctgtgccaaagtggggtagtgaagctattgagaagaaagcattgctgtttcacgccagtgcatggggcatccccggaactctaaccatcatccttttagcgatgaataaaattgaaggtgacaatattagtggcgtgtgttttgttggcctctacgatgttgatgcattgagatattttgttcttgctcccctctgcctgtatgtggtagttggggtttctctcctcttagctggcattatatccctaaacagagttcgaattgagattccattagaaaaggagaaccaagataaattagtgaagtttatgatccggatcggtgttttcagcattctttatctcgtaccactcttggttgtaattggatgctacttttatgagcaagcttaccggggcatctgggaaacaacgtggatacaagaacgctgcagagaatatcacattccatgtccatatcaggttactcaaatgagtcgtccagacttgattctctttctgatgaaatacctgatggctctcatagttggcattccctctgtattttgggttggaagcaaaaagacatgctttgaatgggccagtttttttcatggtcgtaggaaaaaagagatagtgaatgagagccgacaggtactccaggaacctgattttgctcagtctctcctgagggatccaaatactcctatcataagaaagtcaaggggaacttccactcaaggaacatccacccatgcttcttcaactcagctggctatggtggatgatcaaagaagcaaagcaggaagcatccacagcaaagtgagcagctaccacggcagcctccacagatcacgtgatggcaggtacacgccctgcagttacagaggaatggaggagagactacctcatggcagcatgtcacgactaacagatcactccaggcatagtagttctcatcggctcaatgaacagtcacgacatagcagcatcagagatctcagtaataatcccatgactcatatcacacatggcaccagcatgaatcgggttattgaagaagatggaaccagtgcttaatttgtcttgtctaaggtggaaatcttgtgctgtttaaaaagcagattttattctttgccttttgcatgactgatagctgtactcacagttaacatgctttcagtcaagtacagattgtgtccactggaaaggtaaatgattgcttttttatattgcatcaaacttggaacatcaaggcatccaaaacactaagaattctatcatcacaaaaataattcgtctttctaggttatgaagagataattatttgtctggtaagcatttttataaacccactcattttatatttagaaaaatcctaaatgtgtggtgactgctttgtagtgaactttcatatactataaactagttgtgagataacattctggtagctcagttaataaaacaatttcagaattaaagaaattttctatgcaaggtttacttctcagatgaacagtaggactttgtagttttatttccactaagtgaaaaaagaactgtgtttttaaactgtaggagaatttaataaatcagcaagggtattttagctaatagaataaaagtgcaacagaagaatttgattagtctatgaaaggttctcttaaaattctatcgaaataatcttcatgcagagatattcagggtttggattagcagtggaataaagagatgggcattgtttcccctataattgtgctgtttttataacttttgtaaatattactttttctggctgtgtttttataacttatccatatgcatgatggaaaaattttaatttgtagccatcttttcccatgtaatagtattgattcatagagaacttaatgttcaaaatttgctttgtggaggcatgtaataagataaacatcatacattataaggtaaccacaattacaaaatggcaaaaca

SEQ ID NO: 179 - DNA, 1376 bp, Homo sapiens
  Homo sapiens prostaglandin E receptor 1 (subtype EP1), 42kD (PTGER1), mRNA
gggggcggcagggctgagcggccggtgatggggaccccacatcccaggcagtgccggcacccctggcgcctgacatgagcccttgcgggcccctcaacctgagcctggcgggcgaggcgaccacatgcgcggcgccctgggtccccaacacgtcggccgtgccgccgtcgggcgcttcgcccgcgctgcccatcttctccatgacgctgggcgccgtgtccaacctgctggcgctggcgctgctggcgcaggccgcgggccgcctgcgacgccgccgctcggccaccaccttcctgctgttcgtggccagcctgctggccaccgacctggcgggccacgtgatcccgggcgcgctggtgctgcgtctgtacactgcggggcgcgctccggccggcggggcctgccacttcctgggcggctgcatggtcttcttcggcctgtgcccgctgctgctgggctgtggcatggccgtggagcgctgcgtgggcgtcacgcggccgctgctccacgccgcgcgggtctcggtcgcccgcgcgcgcctggcgctggccgcggtggccgcggtggccttggccgtggcgctgctgccgctggcgcgcgtgggccgctatgagctgcagtacccgggcacgtggtgcttcatcggcctgggtcccccgggcggctggcgccaggcactgcttgctggcctcttcgccagcctcggcctggtcgcgctcctcgccgcgctggtgtgcaacacgctcagcggcctggccctgcatcgcgcccgctggcgacgccgctcccgacggcctcccccggcctcaggccccgacagccggcgtcgctggggggcgcacggaccccgctcggcctccgcctcgtccgcctcgtccatcgcttcggcctccaccttctttggcggctctcggagcagcggctcggcacgcagagctcgcgcccacgacgtggagatggtgggccagcttgtcggtatcatggtggtgtcgtgcatctgctggagcccaatgctggtgttggtggcgctggccgtcggcggctggagctctacctccctgcagcggccactgttcctggccgtgcgccttgcctcctggaaccagatcctggacccttgggtgtacatcctactgcgccaggccgtgctgcgccaactgcttcgcctcttgcccccgagggccggagccaagggcggccccgcggggctgggcctaacaccgagcgcctgggaggccagctcgctgcgcagctcccggcacagcggcctcagccacttctaagcacaaccagaggcccaacgactaagccagcccaccctgggctgggcccaggtgcgcggcgcagagcctttgggaataaaaagccattctgcg

SEQ ID NO: 180 - DNA, 1998 bp, Homo sapiens
  Homo sapiens transmembrane 7 superfamily member 1 (upregulated in kidney) (TM7SF1), mRNA
cggcgcgatgcgcggagacccccgcgggggcggcggcggccgtgagccccgatgaggcccgagcgtccccggccgcgcggcagcgcccccggcccgatggagaccccgccgtgggacccagcccgcaacgactcgctgccgcccacgctgaccccggccgtgcccccctacgtgaagcttggcctcaccgtcgtctacaccgtgttctacgcgctgctcttcgtgttcatctacgtgcagctctggctggtgctgcgttaccgccacaagcggctcagctaccagagcgtcttcctctttctctgcctcttctgggcctccctgcggaccgtcctcttctccttctacttcaaagacttcgtggcggccaattcgctcagccccttcgtcttctggctgctctactgcttccctgtgtgcctgcagtttttcaccctcacgctgatgaacttgtacttcacgcaggtgattttcaaagccaagtcaaaatattctccagaattactcaaataccggttgcccctctacctggcctccctcttcatcagccttgttttcctgttggtgaatttaacctgtgctgtgctggtaaagacgggaaattgggagaggaaggttatcgtctctgtgcgagtggccattaatgacacgctcttcgtgctgtgtgccgtctctctctccatctgtctctacaaaatctctaagatgtccttagccaacatttacttggagtccaagggctcctccgtgtgtcaagtgactgccatcggtgtcaccgtgatactgctttacacctctcgggcctgctacaacctgttcatcctgtcattttctcagaacaagagcgtccattcctttgattatgactggtacaatgtatcagaccaggcagatttgaagaatcagctgggagatgctggatacgtattatttggagtggtgttatttgtttgggaactcttacctaccaccttagtcgtttatttcttccgagttagaaatcctacaaaggaccttaccaaccctggaatggtccccagccatggattcagtcccagatcttatttctttgacaaccctcgaagatatgacagtgatgatgaccttgcctggaacattgcccctcagggacttcagggaggttttgctccagattactatgattggggacaacaaactaacagcttcctggcacaagcaggaactttgcaagactcaactttggatcctgacaaaccaagccttgggtagcatcagttaacagttttatggacgattcctcagatgaaaagcttcagaaaagcatagtgacagctgaatttttagggcacttttccttaagaaatagaacttgatttttatttgttacaggtttccaatggccccataggaataagcaataatgtagactgataaacccttattttagtactaaagagggagccttgctatttcagtgggtataatttaaactttttaaagaaaatctgtacttttataaagatgtattttgtataacttaaataataatgctaaagtatactagggtttttttttcttgagaatgttactgcaatcatgttgtagtttgcacagacttttatgcataattcactttaaaaatatagaatatatggtctaatagttttttaaagcttttggactaaagtattccacaaatcttacctctttaggtcactgatggtcactccgattctgagtgccacattggtagactcctaaaatacagttgacaacttagccaattgcaactccagtgttgataattaaaatgaaatggtaaagcagcagactgtaaggtctttagagatttttttttaaggttcaggccgtaggttcctcaaggaatctcttaagttttgcccaaagactggtacttcctttcagtagggcgctaatgtatacacattaatgataagttgataacattaaaaatgtagctgacttatcctattaaacctcctctgctatgttcac

SEQ ID NO: 181 - DNA, 2924 bp, Homo sapiens
  Homo sapiens potassium voltage-gated channel, KQT-like subfamily, member 1 (KCNQ1), mRNA
gcagcttccatggcctggggctgtgagaggcccgggaaggcactgtctttgcgcctgcacatgtgtgtgtctggagtgtaggatggcactggtgccgggcctgggcttcctcgagcgtcccaccggctggaagttgtagacgcggccctggacgtgggtgcgcgccaacaccgggcggcgcgtgctgtagatggagacgcgcgggtctaggctcaccggcggccagggccgcgtctacaacttcctcgagcgtcccaccggctggaaatgcttcgtttaccacttcgccgtcttcctcatcgtcctggtctgcctcatcttcagcgtgctgtccaccatcgagcagtatgccgccctggccacggggactctcttctggatggagatcgtgctggtggtgttcttcgggacggagtacgtggtccgcctctggtccgccggctgccgcagcaagtacgtgggcctctgggggcggctgcgctttgcccggaagcccatttccatcatcgacctcatcgtggtcgtggcctccatggtggtcctctgcgtgggctccaaggggcaggtgtttgccacgtcggccatcaggggcatccgcttcctgcagatcctgaggatgctacacgtcgaccgccagggaggcacctggaggctcctgggctccgtggtcttcatccaccgccaggagctgataaccaccctgtacatcggcttcctgggcctcatcttctcctcgtactttgtgtacctggctgagaaggacgcggtgaacgagtcaggccgcgtggagttcggcagctacgcagatgcgctgtggtggggggtggtcacagtcaccaccatcggctatggggacaaggtgccccagacgtgggtcgggaagaccatcgcctcctgcttctctgtctttgccatctccttctttgcgctcccagcggggattcttggctcggggtttgccctgaaggtgcagcagaagcagaggcagaagcacttcaaccggcagatcccggcggcagcctcactcattcagaccgcatggaggtgctatgctgccgagaaccccgactcctccacctggaagatctacatccggaaggccccccggagccacactctgctgtcacccagccccaaacccaagaagtctgtggtggtaaagaaaaaaaagttcaagctggacaaagacaatggggtgactcctggagagaagatgctcacagtcccccatatcacgtgcgaccccccagaagagcggcggctggaccacttctctgtcgacggctatgacagttctgtaaggaagagcccaacactgctggaagtgagcatgccccatttcatgagaaccaacagcttcgccgaggacctggacctggaaggggagactctgctgacacccatcacccacatctcacagctgcgggaacaccatcgggccaccattaaggtcattcgacgcatgcagtactttgtggccaagaagaaattccagcaagcgcggaagccttacgatgtgcgggacgtcattgagcagtactcgcagggccacctcaacctcatggtgcgcatcaaggagctgcagaggaggctggaccagtccattgggaagccctcactgttcatctccgtctcagaaaagagcaaggatcgcggcagcaacacgatcggcgcccgcctgaaccgagtagaagacaaggtgacgcagctggaccagaggctggcactcatcaccgacatgcttcaccagctgctctccttgcacggtggcagcacccccggcagcggcggcccccccagagagggcggggcccacatcacccagccctgcggcagtggcggctccgtcgaccctgagctcttcctgcccagcaacaccctgcccacctacgagcagctgaccgtgcccaggaggggccccgatgaggggtcctgaggaggggatggggctgggggatgggcctgagtgagaggggaggccaagagtggccccacctggccctctctgaaggaggccacctcctaaaaggcccagagagaagagccccactctcagaggccccaataccccatggaccatgctgtctggcacagcctgcacttgggggctcagcaaggccacctcttcctggccggtgtgggggccccgtctcaggtctgagttgttaccccaagcgccctggcccccacatggtgatgttgacatcactggcatggtggttgggacccagtggcagggcacagggcctggcccatgtatggccaggaagtagcacaggctgagtgcaggcccaccctgcttggcccagggggcttcctgaggggagacagagcaacccctggaccccagcctcaaatccaggaccctgccaggcacaggcagggcaggaccagcccacgctgactacagggccaccggcaataaaagcccaggagcccatttggagggcctgggcctggctccctcactctcaggaaatgctgacccatgggcaggagactgtggagactgctcctgagcccccagcttccagcaggagggacagtctcaccatttccccagggcacgtggttgagtggggggaacgcccacttccctgggttagactgccagctcttcctagctggagaggagccctgcctctccgcccctgagcccactgtgcgtggggctcccgcctccaacccctcgcccagtcccagcagccagccaaacacacagaaggggactgccacctccccttgccagctgctgagccgcagagaagtgacggttcctacacaggacaggggttccttctgggcattacatcgcatagaaatcaataatttgtggtgatttggatctgtgttttaatgagtttcacagtgtgattttgattattaattgtgcaagcttttcctaataaacgtggagaatcaca

SEQ ID NO: 182 - DNA, 2433 bp, Homo sapiens
  Homo sapiens protein tyrosine phosphatase, non-receptor type substrate 1 (PTPNS1), mRNA
cagccgcggcccatggagcccgccggcccggcccccggccgcctcgggccgctgctctgcctgctgctcgccgcgtcctgcgcctggtcaggagtggcgggtgaggaggagctgcaggtgattcagcctgacaagtccgtatcagttgcagctggagagtcggccattctgcactgcactgtgacctccctgatccctgtggggcccatccagtggttcagaggagctggaccagcccgggaattaatctacaatcaaaaagaaggccacttcccccgggtaacaactgtttcagagtccacaaagagagaaaacatggacttttccatcagcatcagtaacatcaccccagcagatgccggcacctactactgtgtgaagttccggaaagggagccctgacacggagtttaagtctggagcaggcactgagctgtctgtgcgtgccaaaccctctgcccccgtggtatcgggccctgcggcgagggccacacctcagcacacagtgagcttcacctgcgagtcccacggcttctcacccagagacatcaccctgaaatggttcaaaaatgggaatgagctctcagacttccagaccaacgtggaccccgtaggagagagcgtgtcctacagcatccacagcacagccaaggtggtgctgacccgcgaggacgttcactctcaagtcatctgcgaggtggcccacgtcaccttgcagggggaccctcttcgtgggactgccaacttgtctgagaccatccgagttccacccaccttggaggttactcaacagcccgtgagggcagagaaccaggtgaatgtcacctgccaggtgaggaagttctacccccagagactacagctgacctggttggagaatggaaacgtgtcccggacagaaacggcctcaaccgttacagagaacaaggatggtacctacaactggatgagctggctcctggtgaatgtatctgcccacagggatgatgtgaagctcacctgccaggtggagcatgacgggcagccagcggtcagcaaaagccatgacctgaaggtctcagcccacccgaaggagcagggctcaaataccgccgctgagaacactggatctaatgaacggaacatctatattgtggtgggtgtggtgtgcaccttgctggtggccctactgatggcggccctctacctcgtccgaatcagacagaagaaagcccagggctccacttcttctacaaggttgcatgagcccgagaagaatgccagagaaataacacaggacacaaatgatatcacatatgcagacctgaacctgcccaaggggaagaagcctgctccccaggctgcggagcccaacaaccacacggagtatgccagcattcagaccagcccgcagcccgcgtcggaggacaccctcacctatgctgacctggacatggtccacctcaaccggacccccaagcagccggcccccaagcctgagccgtccttctcagagtacgccagcgtccaggtcccgaggaagtgaatgggaccgtggtttgctctagcacccatctctacgcgctttcttgtcccacagggagccgccgtgatgagcacagccaacccagttcccggagggctggggcggtgcaggctctgggacccaggggccagggtggctcttctctccccacccctccttggctctccagcacttcctgggcagccacggccccctcccccaacattgccacacacctggaggctgacgttgccaaaccagccagggaaccaacctgggaagtggccagaactgcctggggtccaagaactcttgtgcctccgtccatcaccatgtgggttttgaagaccctcgactgcctccccgatgctccgaagcctgatcttccagggtggggaggagaaaatcccacctcccctgacctccaccacctccaccaccaccaccaccaccaccaccaccactaccaccaccacccaactggggctagagtggggaagatttcccctttagatcaaactgccccttccatggaaaagctggaaaaaaactctggaacccatatccaggcttggtgaggttgctgccaacagtcctggcctcccccatccctaggcaaagagccatgagtcctggaggaggagaggacccctcccaaaggactggaagcaaaaccctctgcttccttgggtccctccaagactccctggggcccaactgtgttgctccacccggacccatctctcccttctagacctgagcttgcccctccagctagcactaagcaacatctcgctgtaagcgcctgtaaattactgtgaaatgtgaaacgtgcaatcttgaaactgaggtgttagaaaacttgatctgtggtgttttgttttgttttttttcttaaaacaacagcaacgtgaaaaaaaaaaaaaaaaa

SEQ ID NO: 183 - DNA, 2145 bp, Homo sapiens
  Homo sapiens protein tyrosine phosphatase, non-receptor type 6 (PTPN6), mRNA
cggcagaactgggaccaccgggggtggtgaggcggcccggcactgggagctgcatctgaggcttagtccctgagctctctgcctgcccagactagctgcacctcctcattccctgcgcccccttcctctccggaagcccccaggatggtgaggtggtttcaccgagacctcagtgggctggatgcagagaccctgctcaagggccgaggtgtccacggtagcttcctggctcggcccagtcgcaagaaccagggtgacttctcgctctccgtcagggtgggggatcaggtgacccatattcggatccagaactcaggggatttctatgacctgtatggaggggagaagtttgcgactctgacagagctggtggagtactacactcagcagcagggtgtggtgcaggaccgcgacggcaccatcatccacctcaagtacccgctgaactgctccgatcccactagtgagaggtggtaccatggccacatgtctggcgggcaggcagagacgctgctgcaggccaagggcgagccctggacgtttcttgtgcgtgagagcctcagccagcctggagacttcgtgctttctgtgctcagtgaccagcccaaggctggcccaggctccccgctcagggtcacccacatcaaggtcatgtgcgagggtggacgctacacagtgggtggtttggagaccttcgacagcctcacggacctggtggagcatttcaagaagacggggattgaggaggcctcaggcgcctttgtctacctgcggcagccgtactatgccacgagggtgaatgcggctgacattgagaaccgagtgttggaactgaacaagaagcaggagtccgaggatacagccaaggctggcttctgggaggagtttgagagtttgcagaagcaggaggtgaagaacttgcaccagcgtctggaagggcaacggccagagaacaagggcaagaaccgctacaagaacattctcccctttgaccacagccgagtgatcctgcagggacgggacagtaacatccccgggtccgactacatcaatgccaactacatcaagaaccagctgctaggccctgatgagaacgctaagacctacatcgccagccagggctgtctggaggccacggtcaatgacttctggcagatggcgtggcaggagaacagccgtgtcatcgtcatgaccacccgagaggtggagaaaggccggaacaaatgcgtcccatactggcccgaggtgggcatgcagcgtgcttatgggccctactctgtgaccaactgcggggagcatgacacaaccgaatacaaactccgtaccttacaggtctccccgctggacaatggagacctgattcgggagatctggcattaccagtacctgagctggcccgaccatggggtccccagtgagcctgggggtgtcctcagcttcctggaccagatcaaccagcggcaggaaagtctgcctcacgcagggcccatcatcgtgcactgcagcgccggcatcggccgcacaggcaccatcattgtcatcgacatgctcatggagaacatctccaccaagggcctggactgtgacattgacatccagaagaccatccagatggtgcgggcgcagcgctcgggcatggtgcagacggaggcgcagtacaagttcatctacgtggccatcgcccagttcattgaaaccactaagaagaagctggaggtcctgcagtcgcagaagggccaggagtcggagtacgggaacatcacctatcccccagccatgaagaatgcccatgccaaggcctcccgcacctcgtccaaacacaaggaggatgtgtatgagaacctgcacactaagaacaagagggaggagaaagtgaagaagcagcggtcagcagacaaggagaagagcaagggttccctcaagaggaagtgagcggtgctgtcctcaggtggccatgcctcagccctgaccctgtggaagcatttcgcgatggacagactcacaacctgaacctaggagtgccccattcttttgtaatttaaatggctgcatcccccccacctctccctgaccctgtatatagcccagccaggccccaggcagggccaacccttctcctcttgtaaataaagccctgggatcact

SEQ ID NO: 184 - DNA, 1393 bp, Homo sapiens
  Homo sapiens protease, cysteine, 1 (legumain) (PRSC1), mRNA
gccgccgccgccaccactgccaccacggtcgcctgccacaggtgtctgcaattgaactccaaggtgcagaatggtttggaaagtagctgtattcctcagtgtggccctgggcattggtgccgttcctatagatgatcctgaagatggaggcaagcactgggtggtgatcgtggcaggttcaaatggctggtataattataggcaccaggcagacgcgtgccatgcctaccagatcattcaccgcaatgggattcctgacgaacagatcgttgtgatgatgtacgatgacattgcttactctgaagacaatcccactccaggaattgtgatcaacaggcccaatggcacagatgtctatcagggagtcccgaaggactacactggagaggatgttaccccacaaaatttccttgctgtgttgagaggcgatgcagaagcagtgaagggcataggatccggcaaagtcctgaagagtggcccccaggatcacgtgttcatttacttcactgaccatggatctactggaatactggtttttcccaatgaagatcttcatgtaaaggacctgaatgagaccatccattacatgtacaaacacaaaatgtaccgaaagatggtgttctacattgaagcctgtgagtctgggtccatgatgaaccacctgccggataacatcaatgtttatgcaactactgctgccaaccccagagagtcgtcctacgcctgttactatgatgagaagaggtccacgtacctgggggactggtacagcgtcaactggatggaagactcggacgtggaagatctgactaaagagaccctgcacaagcagtaccacctggtaaaatcgcacaccaacaccagccacgtcatgcagtatggaaacaaaacaatctccaccatgaaagtgatgcagtttcagggtatgaaacgcaaagccagttctcccgtccccctacctccagtcacacaccttgacctcacccccagccctgatgtgcctctcaccatcatgaaaaggaaactgatgaacaccaatgatctggaggagtccaggcagctcacggaggagatccagcggcatctggatgccaggcacctcattgagaagtcagtgcgtaagatcgtctccttgctggcagcgtccgaggctgaggtggagcagctcctgtccgagagagccccgctcacggggcacagctgctacccagaggccctgctgcacttccggacccactgcttcaactggcactcccccacgtacgagtatgcgttgagacatttgtacgtgctggtcaacctttgtgagaagccgtatccacttcacaggataaaattgtccatggaccacgtgtgccttggtcactactgaagagctgcctcctggaagctt

SEQ ID NO: 185 - DNA, 4018 bp, Homo sapiens
  Homo sapiens HIR (histone cell cycle regulation defective) homolog A (S. cerevisiae) (HIRA), mRNA
  modified_base (3525): a, c, g, t, other or unknown
  modified_base (3668): a, c, g, t, other or unknown
  modified_base (3681): a, c, g, t, other or unknown
gatgcggctgtggtggcggcggcggcggccgagcgcgggtggcggctgtggcggcggaggggggcgcgggccggcgatggcgcggcggccctgagggcgcggggcgggcggcggccggagggcgggcggcgcgggaggaagcggcggcggtggctccatggcccgggcgcgctgagggacccggcgctcgcctcagcccggcggcggcggcggccgaacaatgaagctcctgaagccgacctgggtcaaccacaatggcaagccgattttttcagttgatattcaccctgacgggaccaagttcgcaactggaggacaagggcaggattctgggaaggttgtgatctggaatatgtctccagtcctccaggaggatgacgagaaggatgaaaatattcccaagatgctttgccagatggacaatcacttagcatgtgtgaactgtgtgcggtggtcaaacagtgggatgtatttagcttctgggggagatgacaaactgattatggtgtggaagcgggctacgtacatcggccccagcaccgtgttcggctccagtggtaagcttgccaatgtggagcagtggcggtgtgtctctatcctccggaatcattcaggcgatgtgatggatgtagcatggtctccccacgatgcctggctagcctcatgcagcgtggataacactgtcgtcatctggaatgctgtaaagttcccagaaattctagctactctgagaggtcattctggcttggtcaaagggttgacatgggaccctgttggtaaatacatagcttctcaagctgatgaccgcagcctaaaggtgtggaggacgctggactggcagttggagaccagcatcaccaagccttttgatgagtgtggaggaacgacccatgtgttgcggctcagctggtcacctgatgggcattacctggtgtctgcccatgccatgaacaactcaggccccactgcccagatcatcgaacgggagggatggaagaccaacatggactttgttgggcaccggaaagctgtgactgtcgtgaaattcaacccaaaaatcttcaaaaagaagcagaagaatgggagttctgcgaagcctagctgcccgtactgctgctgtgctgttggcagcaaggaccgctcgctttctgtctggctcacatgtctgaaacggccgctggtggtcatccatgaactgtttgacaaatccatcatggatatttcctggactctgaatgggctgggcatcttggtatgctctatggacggctctgtggcattcctcgacttctcccaggatgagcttggcgatcccctgagcgaggaggagaagagccgcattcaccagtccacctatggcaagagcctagccatcatgaccgaggcccagctctccacagccgtcattgagaaccctgagatgctcaagtaccagcgaaggcagcagcagcagcagctggaccagaagagtgctgcgaccagggagatgggctcagccacctcagtcgcaggcgttgtcaacggggagagtcttgaagatatcaggaagaatcttttgaagaaacaagttgagactcggacagcagatggccggagaagaatcacgcctctctgcatagcacagctggacactggggacttctccacggcattctttaacagcatccccctctcgggctccctggcgggcaccatgctctcttctcatagcagtccacagctactgccactggactccagtacccctaactccttcggcgcctcgaagccttgcacagagcctgtggtggctgccagtgccagacctgcaggcgattctgtcaataaagacagtatgaatgctacctctactcctgctgcattgtcaccttctgtgttaacgaccccgtccaagatcgaacccatgaaagcgtttgactcccggttcacagagcggtccaaagccacaccaggtgctcctgccctgaccagcatgactccgacagctgtggaaaggttaaaagagcagaaccttgtgaaagagctgaggccccgagacctcctggagagcagcagtgacagcgatgagaaagtccctttggctaaggcttcctcactgtccaagcgaaaacttgagcttgaggtagagacagtagagaagaagaagaaagggcggcctcggaaggactctcgtctcatgcctgtgtctctgtctgtccagtctccagctgccctaaccgcagagaaggaggccatgtgtctgtctgcaccagcacttgcactgaagctgccaattccaagcccccagagagcattcaccctccaggtcagctccgatccttccatgtacattgaggtggagaatgaagtgacagtggtggggggcgtgaagctgagccgcctgaagtgcaaccgggaagggaaggagtgggagacggtactcaccagccggatcctcactgctgcgggcagctgtgacgtggtgtgtgtcgcctgtgaaaaaaggatgctgtcagtgttctccacctgtggtcgccgtctcctctctcccatcctcctgccatccccgatctctactttgcattgcacaggctcctacgtcatggcgctcaccgctgcagccacactctctgtctgggatgttcacagacaggtggttgtggtgaaagaagagtctctgcactccatcctggcaggaagtgatatgacggtatcacagatcttgctgacgcagcatggaatcccagtaatgaacctgtccgatgggaaggcgtactgctttaatccgtcactttccacatggaacctggtttctgacaagcaggactcactggctcagtgtgcagactttaggagcagcctgccatcccaggacgccatgctgtgctcaggaccgttagccataaaccagggccgcacctccaactcgggaaggcaggctgcccggctcttctccgtgcctcatgtggtgcagcaagagaccaccctggcctacctagagaaccaggtggcagcagcactcaccctgcagtccagccacgagtaccgccattggctcctcgtctacgcacggtacctcgtaaacgaagggtttgaataccgacttcgagaaatatgcaaggacttactgggtccggttcactactccactggaagccagtgggagtcaacagtagtgggtctgcggaagagggagctgctgaaggagctgctaccagtcatcgggcagaacctccgattccagcgcctcttcaccgagtgtcaggaacagctcgacatcctgagggacaagtagcctgccccagcctgccctggctgcagcaagggcagggccacactctcgccgctgatgacatgcaggaccgcctctcacctgaccaggctgtagggggaggagacactggcaggagatgtgctgtcctgcaccagcgccagcccagctccctgggcagatgtgccctgtgtcctgggtctgacattgcctcaggagggggaagctcatccctccctccaagcccccgatgcggagctagggctggagctctngccaggtgccctggggccagcaaggcagtcccaggcctgccgtctccagcacggccccaaggtggacactagcccctgctgctgcaggcgccatgctgcttcagcagtgacgattgagccatttgtgagacagaatccggaancgttaaggtattnacagcagactgacctaagacctatgtaacaaggaaaagctgttccaacacacggactatttttgtactaagaatttgctaacttgtaatattgaatttcctttggccgataatcaggatttccctataagtcacttggacattggtcacttgtaggaaatttaaactctaattatgacagctacactgaaaaataattgtactgaaattaacttgtctatcttcatttggttttaatttttaaatgtttgtaaaaagagactgttttgggggaatggggcaaaggggtgggcgatttcttttgtaagtgtaaaataaatgaacacgcattgaatacc

SEQ ID NO: 186 - DNA, 2910 bp, Homo sapiens
  Homo sapiens transcription factor 7 (T-cell specific, HMG-box) (TCF7), mRNA
gcccaggtgactgactaatccgccgccttcaggagacagaattggccaaggcctgaaggccccggagtgcaccagcggcatgtacaaagagaccgtctactccgccttcaatctgctcatgcattacccacccccctcgggagcagggcagcacccccagccgcagcccccgctgcacaaggccaatcagcccccccacggtgtcccccaactctctctctacgaacatttcaacagcccacatcccacccctgcacctgcggacatcagccagaagcaagttcacaggcctctgcagacccctgacctctctggcttctactccctgacctcaggcagcatggggcagctcccccacactgtgagctggttcacccacccatccttgatgctaggttctggtgtacctggtcacccagcagccatcccccacccggccattgtgcccccctcagggaagcaggagctgcagcccttcgaccgcaacctgaagacacaagcagagtccaaggcagagaaggaggccaagaagccaaccatcaagaagcccctcaatgccttcatgctgtacatgaaggagatgagagccaaggtcattgcagagtgcacacttaaggagagcgctgccatcaaccagatcctgggccgcaggtggcacgcgctgtcgcgagaagagcaggccaagtactatgagctggcccgcaaggagaggcagctgcacatgcagctatacccaggctggtcagcgcgggacaactacgggaagaagaagaggcggtcgagggaaaagcaccaagaatccaccacagaccctggctcgcctaagaaatgccgtgctcgctttggcctcaaccagcagacggattggtgtggtccgtgcagataactctcttcactattcctaggaggaaaaagaaatgcattcggtacttacccggagaaggccgctgccccagccccgttccttccgatgacagtgctctaggctgccccgggtccccagctccccaggactcaccctcataccatctgctgccccgcttccccacagaactgcttactagccctgcggagcggcacctacatccccaggtctctccactgctctcagcctcccaaccccagggcccccacaggccccccgcagcaccctgcagagcacacaggtacagcaacaggaatctcagagacaggtggcctagcaggcacaggacacctggccgcctccaggagcctaccccctgaaaatgacagagacccagatctcatggaaactggcaggggtcctgttaacgtcatctcagggtccagaccctgaagatttcagaggctgcagaacttctgcctgaacctggggtcatcgattcaaactgctccaagtggtgggaatcagatctgtcttgatgtgtcatctaattaagggaatcccttgtacctatgactccgtcgatctattctttgtaccatctgtcttgccagccagaagcctctgcctccctagcttttctgctataggtcagagatgggctgaactgagcctagctaccttctctacccatctcccccatcccccactgccacaccctccccattcagacacttcatggaccaagaatgagctggtttgtcaaacaacatgtgagcatggtcacaagcacaaagctcaagatgacagctcttctaaggaaatggagaagctctgtttataaaaacaaaaacaaaaccagctgctactcataagttggaccagaggaagccccttactatgatctcaggagcttgcaagaagcaggaaggggaatggaataggttaagtttaggcctatcaacctaagcaacagaaataatctgacactaccttatcaggcaaattggggaggggagggtgtatctagctctagttcaaattatttggaagtgttccctgagaaacccaccagcctaagaagctctggccccaggcttgtcactagcagctgcagtcaacagttcaaagaagtcatggcccaaatccagtgtgcacccctccccattcacagagcctttttcacaattccatttccagttcatctatggcagtccagccagcttctgggcagcttgagagggcaaacccaaaacctcatgacagccagagcctgtctttcagcattcagtcgcctgggaagctccagtttccccatggggctgcgggacagaggaccattacaactagatcaaggagcccagaaaacctccagtagtggacaacaggttttcaccatagcctacgttaacccatttttgagccaagcttcaaccctcagccttgaaaaacaagtctttaatttaatttttgttttttgcctaaatccaaagaaaaagggctgccgggccaggcgcggtcgtcacgcctgtaatcccagcactttggcaggccgaggcaggtggatcacctgacgtcagtagtttgagaccagcctggccaacatggtgaaaccctgtatctactaaaaatacaaaaattagccggacgtggtggtgcgcgcatgtaatcccagctactcgggaggctgaggcggaagaatcacttgaacccgggaggcggaggttccagtgagccgagatggcgctattgcactccagtctgggtaacagggagactgcatctcaaaaaaaaaaaaaaaaaaaaagggctgtccatgtattcacacacccctcaaaaaaagcctttagttcctactttagccactggtttctcagaatccaaagatcacatattctagtgtaacactgcaagaagtcttgagaaaaagattattgtagtgttcaaaatatttttgtattgttaatgcatcatcatagaaaaacttttaaacatgagaataaagatactttttactgggtttgtttttcaaagcctgaaaaaaa

SEQ ID NO: 187 - DNA, 2899 bp, Homo sapiens
  Homo sapiens TGFB inducible early growth response (TIEG), mRNA
cagacggcgctgagcgcggcggcggcgggagcggcgtcgagtgtctccgtgcgcccgtctgtggccaagcagccagcagcctagcagccagtcagcttgccgccggcggccaagcagccaaccatgctcaacttcggtgcctctctccagcagactgcggaggaaagaatggaaatgatttctgaaaggccaaaagagagtatgtattcctggaacaaaactgcagagaaaagtgattttgaagctgtagaagcacttatgtcaatgagctgcagttggaagtctgattttaagaaatacgttgaaaacagacctgttacaccagtatctgatttgtcagaggaagagaatctgcttccgggaacacctgattttcatacaatcccagcattttgtttgactccaccttacagtccttctgactttgaaccctctcaagtgtcaaatctgatggcaccagcgccatctactgtacacttcaagtcactctcagatactgccaaacctcacattgccgcacctttcaaagaggaagaaaagagcccagtatctgcccccaaactccccaaagctcaggcaacaagtgtgattcgtcatacagctgatgcccagctatgtaaccaccagacctgcccaatgaaagcagccagcatcctcaactatcagaacaattcttttagaagaagaacccacctaaatgttgaggctgcaagaaagaacataccatgtgccgctgtgtcaccaaacagatccaaatgtgagagaaacacagtggcagatgttgatgagaaagcaagtgctgcactttatgacttttctgtgccttcctcagagacggtcatctgcaggtctcagccagcccctgtgtccccacaacagaagtcagtgttggtctctccacctgcagtatctgcagggggagtgccacctatgccggtcatctgccagatggttccccttcctgccaacaaccctgttgtgacaacagtcgttcccagcactcctcccagccagccaccagccgtttgcccccctgttgtgttcatgggcacacaagtccccaaaggcgctgtcatgtttgtggtaccccagcccgttgtgcagagttcaaagcctccggtggtgagcccgaatggcaccagactctctcccattgcccctgctcctgggttttccccttcagcagcaaaagtcactcctcagattgattcatcaaggataaggagtcacatctgtagccacccaggatgtggcaagacatactttaaaagttcccatctgaaggcccacacgaggacgcacacaggagaaaagcctttcagctgtagctggaaaggttgtgaaaggaggtttgcccgttctgatgaactgtccagacacaggcgaacccacacgggtgagaagaaatttgcgtgccccatgtgtgaccggcggttcatgaggagtgaccatttgaccaagcatgcccggcgccatctatcagccaagaagctaccaaactggcagatggaagtgagcaagctaaatgacattgctctacctccaacccctgctcccacacagtgacagaccggaaagtgaagagtcagaactaactttggtctcagcgggagccagtggtgatgtaaaaatgcttccactgcaagtctgtggccccacaacgtgggcttaaagcagaagccccacagcctggcacgaaggccccgcctgggttaggtgactaaaagggcttcggccacaggcaggtcacagaaaggcaggtttcatttcttatcacataagagagatgagaaagcttttattcctttgaatattttttgaaggtttcagatgaggtcaacacaggtagcacagattttgaatctgtgtgcatatttgttactttacttttgctgtttatacttgagaccaacttttcaatgtgattcttctaaagcactggtttcaagaatatggaggctggaaggaaataaacattacggtacagacatggagatgtaaaatgagtttgtattattacaaatattgtcatctttttctagagttatcttctttattattcctagtctttccagtcaacatcgtggatgtagtgattaaatatatctagaactatcatttttacactattgtgaatatttggaattgaacgactgtatattgctaagagggcccaaagaattggaatcctccttaatttaattgctttgaagcatagctacaatttgtttttgcatttttgttttgaaagtttaacaaatgactgtatctaggcatttcattatgctttgaactttagtttgcctgcagtttcttgtgtagatttgaaaattgtataccaatgtgttttctgtagactctaagatacactgcactttgtttagaaaaaaaactgaagatgaaatatatattgtaaagaagggatattaagaatcttagataacttcttgaaaaagatggcttatgtcatcagtaaagtacctttatgttatgaggatataatgtgtgctttattgaattagaaaattagtgaccattattcacaggtggacaaatgttgtcctgttaatttataggagttttttggggatgtggaggtagttgggtagaaaaattattagaacattcacttttgttaacagtatttctcttttattctgttatatagtggatgatatacacagtggcaaaacaaaagtacattgcttaaaatatatagtgaaaaatgtcactatatcttcccatttaacattgtttttgtatattgggtgtagatttctgacatcaaaacttggacccttggaaaacaaaagttttaattaaaaaaaatccttgtgacttacaatttgcacaatatttcttttgttgtactttatatcttgtttacaataaagaattc

SEQ ID NO: 188 - DNA, 10011 bp, Homo sapiens
  Homo sapiens trichorhinophalangeal syndrome I gene (TRPS1), mRNA
ttcctccgcgaaggctcctttgatattaatagtgttggtgtcttgaaactgacgtaatgcgcggagactgaggtcctgacaagcgataacatttctgataaagacccgatcttactgcaatctctagcgtcctcttttttggtgctgctggtttctccagacctcgcgtcctctcgattgctctctcgccttcctatttcttttttttttttttaaacaaaaaacaacaccccctcccctctcccacccggcaccgggcacatccttgctctatttcctttctctttctctctctctctctctcttttttaataagggtgggggagggaaaggggggggaggcaggaaagacctttttctctcccccccgcaataatccaagatcaactctgcaaacaacagaagacggttcatggctttggccgccgcgccaccatctttcgggctgccgagggtgttcttgacgattaatcaacagatgtacagatcagctctcaaaatgtcttctgtgtcttctgagcgtcttctaagacaattgcattagcctcctgctagttgactaatagaattaataattgtaaaaagcactctaaagccacatgccttatgaagtcaatgctgggtatgattttacaaatatggtccggaaaaagaacccccctctgagaaacgttgcaagtgaaggcgagggccagatcctggagcctataggtacagaaagcaaggtatctggaaagaacaaagaattctctgcagatcagatgtcagaaaatacggatcagagtgatgctgcagaactaaatcataaggaggaacatagcttgcatgttcaagatccatcttctagcagtaagaaggacttgaaaagcgcagttctgagtgagaaggctggcttcaattatgaaagccccagtaagggaggaaactttccctcctttccgcatgatgaggtgacagacagaaatatgttggctttctcatttccagctgctgggggagtctgtgagcccttgaagtctccgcaaagagcagaggcagatgaccctcaagatatggcctgcaccccctcaggggactcactggagacaaaggaagatcagaagatgtcaccaaaggctacagaggaaacagggcaagcacagagtggtcaagccaattgtcaaggtttgagcccagtttcagtggcctcaaaaaacccacaagtgccttcagatgggggtgtaagactgaataaatccaaaactgacttactggtgaatgacaacccagacccggcacctctgtctccagagcttcaggactttaaatgcaatatctgtggatatggttactacggcaacgaccccacagatctgattaagcacttccgaaagtatcacttaggactgcataaccgcaccaggcaagatgctgagctggacagcaaaatcttggcccttcataacatggtgcagttcagccattccaaagacttccagaaggtcaaccgttctgtgttttctggtgtgctgcaggacatcaattcttcaaggcctgttttactaaatgggacctatgatgtgcaggtgacttcaggtggaacattcattggcattggacggaaaacaccagattgccaagggaacaccaagtatttccgctgtaaattctgcaatttcacttatatgggcaactcatccaccgaattagaacaacattttcttcagactcacccaaacaaaataaaagcttctctcccctcctctgaggttgcaaaaccttcagagaaaaactctaacaagtccatccctgcacttcaatccagtgattctggagacttgggaaaatggcaggacaagataacagtcaaagcaggagatgacactcctgttgggtactcagtgcccataaagcccctcgattcctctagacaaaatggtacagaggccaccagttactactggtgtaaattttgtagtttcagctgtgagtcatctagctcacttaaactgctagaacattatggcaagcagcacggagcagtgcagtcaggcggccttaatccagagttaaatgataagctttccaggggctctgtcattaatcagaatgatctagccaaaagttcagaaggagagacaatgaccaagacagacaagagctcgagtggggctaaaaagaaggacttctccagcaagggagccgaggataatatggtaacgagctataattgtcagttctgtgacttccgatattccaaaagccatggccctgatgtaattgtagtggggccacttctccgtcattatcaacagctccataacattcacaagtgtaccattaaacactgtccattctgtcccagaggactttgcagcccagaaaagcaccttggagaaattacttatccgtttgcttgtagaaaaagtaattgttcccactgtgcactcttgcttctgcacttgtctcctggggcggctggaagctcgcgagtcaaacatcagtgccatcagtgttcattcaccacccctgacgtagatgtactcctctttcactatgaaagtgtgcatgagtcccaagcatcggatgtcaaacaagaagcaaatcacctgcaaggatcggatgggcagcagtctgtcaaggaaagcaaagaacactcatgtaccaaatgtgattttattacccaagtggaagaagagatttcccgacactacaggagagcacacagctgctacaaatgccgtcagtgcagttttacagctgccgatactcagtcactactggagcacttcaacactgttcactgccaggaacaggacatcactacagccaacggcgaagaggacggtcatgccatatccaccatcaaagaggagcccaaaattgacttcagggtctacaatctgctaactccagactctaaaatgggagagccagtttctgagagtgtggtgaagagagagaagctggaagagaaggacgggctcaaagagaaagtttggaccgagagttccagtgatgaccttcgcaatgtgacttggagaggggcagacatcctgcgggggagtccgtcatacacccaagcaagcctggggctgctgacgcctgtgtctggcacccaagagcagacaaagactctaagggatagtcccaatgtggaggccgcccatctggcgcgacctatttatggcttggctgtggaaaccaagggattcctgcagggggcgccagctggcggagagaagtctggggccctcccccagcagtatcctgcatcgggagaaaacaagtccaaggatgaatcccagtccctgttacggaggcgtagaggctccggtgttttttgtgccaattgcctgaccacaaagacctctctctggcgaaagaatgcaaatggcggatatgtatgcaacgcgtgtggcctctaccagaagcttcactcgactcccaggcctttaaacatcattaaacaaaacaacggtgagcagattattaggaggagaacaagaaagcgccttaacccagaggcacttcaggctgagcagctcaacaaacagcagaggggcagcaatgaggagcaagtcaatggaagcccgttagagaggaggtcagaagatcatctaactgaaagtcaccagagagaaattccactccccagcctaagtaaatacgaagcccagggttcattgactaaaagccattctgctcagcagccagtcctggtcagccaaactctggatattcacaaaaggatgcaacctttgcacattcagataaaaagtcctcaggaaagtactggagatccaggaaatagttcatccgtatctgaagggaaaggaagttctgagagaggcagtcctatagaaaagtacatgagacctgcgaaacacccaaattattcaccaccaggcagccctattgaaaagtaccagtacccactttttggacttccctttgtacataatgacttccagagtgaagctgattggctgcggttctggagtaaatataagctctccgttcctgggaatccgcactacttgagtcacgtgcctggcctaccaaatccttgccaaaactatgtgccttatcccaccttcaatctgcctcctcatttttcagctgttggatcagacaatgacattcctctagatttggcgatcaagcattccagacctgggccaactgcaaacggtgcctccaaggagaaaacgaaggcaccaccaaatgtaaaaaatgaaggtcccttgaatgtagtaaaaacagagaaagttgatagaagtactcaagatgaactttcaacaaaatgtgtgcactgtggcattgtctttctggatgaagtgatgtatgctttgcatatgagttgccatggtgacagtggacctttccagtgcagcatatgccagcatctttgcacggacaaatatgacttcacaacacatatccagaggggcctgcataggaacaatgcacaagtggaaaaaaatggaaaacctaaagagtaaaaccttagcacttagcacaattaaatagaaataggttttcttgatgggaattcaatagcttgtaatgtcttatgaagacctattaaaaaaatacttcatagagcctgccttatccaacatgaaattcccttcttttgttattctttcttttgatgagtaggttaccaagattaaaaagtgagataaatggtcaatgagaaagaatggaagatggtaaacaatcactttttaaaacctgttaagtcaaaaccatcttggctaatatgtactggggaaataatccataagagatatcaccagactagaattaatatatttataaagaaagagaccaaaactgtctagaatttgaaagggtttacatattattatactaaagcagtactggactggccattggaccatttgttccaaaacccataaattgttgcctaaatttataatgatcatgaaaccctaggcagaggaggagaaattgaaggtccagggcaatgaaagaaaaatggcgccctctcaatttagtcttctctcattggccatgtttcagattttgacctagaaatgcgagctgtggttaggcttggttagagtgcagcaagcaacatgacagatggtggcacgctgtttttacccagccctgcctgtacatacacatgcacaccctctctgatatttttgtcctttagatgttcaaatactcagtagtccttttgtttgcggtttagattcattttgtccacacatgtacccattttaaaaaacaatgtcctcgatgcttctgtagtgatttcattttagccaggtatttctttcttgtgtgtgatgaaccagtatggatttgcttttctaagcctcctgttggttactaatctcacttggcacattataactaaaggaatcccctcaattcaaaagcatagatggatacaaatgtcagaccgtgggtttaatttgtttagaacacatggcatttcttcacaaggtaacctgctgtatttatttattttcttttggttaaatataatttccaaactttgtggtcaggcagcgtctaaggttacgttaccacagactgacagttggtatatgtaccagccaatcccttcattaaatgtatacagatttagttaagtagcattaaataggattcttagaagtatgtcctcatagaacttttaatacttaaggctttgtaaaaactatccatgaagggaaagctcctcagcataactgctcagggaaatagggctaaataactgaacattaaataattggttaaaggtgctgttagtcgagcctcaatgcttgctacaaggatgtatgtacaaggactgactttaataatttgcattatattgtcccaaccagtagtttattttttgccacggagatgtagaagatattacaagctactggatgcactgtcagattaacttatttcattaaagaagttgggagaacaaataggaaaaaaaaaacttatttttctagtaaatattaatgtattacatttcaaataatggtgcctgacatattgaataattattttctacagtgtacgtatgcaacaaagatattccatcatgcattagagtcagttctggctctgcctagctgtttacatttgcaaatgtagcaaacaaggtaatgaagcaactatttctattgcagtagatatccttttgtgtgtgtgtgtgtgcattaaagttgtaaacggtaacatgaaacaaatgaaagttcttgctataatggtatggaaaacaagaaggaaatgaaaatatttttatgcctacttaggaaaaaaagggtagcacttattcattccaagtacttttttttttttaatttttaagctcttaactcacattgttatgcttaagatgataaacatatatcctctttttattgctttgtctatgtttcatatgaaacatttcagaaattattttgataagtgttgctggaatctgcaacgctgatttttttttgcattctgtagtcgcatttgcactccatttttacattaattcgcagttgctttgtatcattgttttgtttgggttttgtttctttttcacagtgccgggtcttcgtttcttaaagttggatggcaggtagagttcaaccagttcgtgactgttgtagcgaatgaagttaaaaaaatgtctttctgatgttgtgttgtcattttcatttttgcatttttttgtttgcatattaaaaaaagagaaaagagaaagcaagagacagaaatcaggactaagtcctctgcttcagtttcattgttaacgggccttattctgatctcacctgtcgcgtagctctaatattcacataaactgaaataaagaagtggaatgaggagctttgacattcaaattatgtgatgtaatttatcttccttaggaattttgatggatgcatctcaaaatgtatagccagacttgagaggtgacaattaaagatctaaaaaagagaggagattcccccaaacaacaatatttaattttcttagtaaaaagaataacagaatgcatcgtggcaatccttaagcaacattatctatgtggactgcttaaatcagcaaaacaccagaagtttggttaacttgggcaatatgacaagtattactttttgggcaaaactactcattaagcaatttctctagtgtgtcggacacaaataggttctttatttttggcatgtatgcctttttattttcattcaattttttttttttctcagacagacatagtagtatcaactagcattggaaaatacatatcactattcttggaatatttatggtcagtctactttttagtaaaatatttttggatagcgttgacacgatagatcttattccatacttctttattattgataattttattttcattttttgctttcattattatacatattttggtggagaagaggttgggcttttttgaaagagacaaaaatttattataacactaaacactccttttttgacatattaaagcctttattccatctctcaagatatattataaaatttatttttttaatttaagatttctgaattattttatcttaaattgtgattttaaacgagctattatggtacggaactttttttaatgaggaatttcatgatgatttaggaattttctctcttggaaaaggcttcccctgtgatgaaaatgatgtgccagctaaaattgtgtgccatttaaaaactgaaaatattttaaaattatttgtctatattctaaattgagctttggatcaaactttaggccaggaccagctcatgcgttctcattcttccttttctcactctttctctcatcactcacctctgtattcattctgttgtttgggatagaaaaatcataaagagccaacccatctcagaacgttgtggattgagagagacactacatgactccaagtatatgagaaaaggacagagctctaattgataactctgtagttcaaaaggaaaagagtatgcccaattctctctacatgacatattgagattttttttaatcaacttttaagatagtgatgttctgttctaaactgttctgttttagtgaaggtagatttttataaaacaagcatggggattcttttctaaggtaatattaatgagaagggaaaaaagtatctttaacagctctttgttgaagcctgtggtagcacattatgtttataattgcacatgtgcacataatctattatgatccaatgcaaatacagctccaaaaatattaaatgtatatatattttaaaatgcctgaggaaatacatttttcttaataaactgaagagtctcagtatggctattaaaataattattagcctcctgttgtgtggctgcaaaacatcacaaagtgaccggtcttgagacctgtgaactgctgccctgtttagtaaataaaattaatgcatttctagagggggaatatctgccatccagtggtggaaatgtggagtaaagaagctggtggtctgcttctgtgctgtatgccagccttttgccttaagttgagaggaggtcaactttagctactgtctttggtttgagagccatggcaaaaaaaaaaaaagaaaaaaagatcaagtcgtctttggtgagccagtaaggtgaaagcttgctgactgtccaaggcacaagagaaaattgaggaattgaaatgcaacctgagtatcaaactaaatattctaatcaaaggtaggtactgttaggtggaattctatcagcaggcaactgcaaatgagaagaagatagaaggacgcccgtcgggactttggagggcattgttattttcccaaagaaagacggccaagggcagaggcatggattctttgcagagcacttccttttggtttttcagtactgtttcatagacagtgggctcacatgttcctgatagtgctgcagttgcttagaaagcatcccagttaattgcagtaattagaacttctggaatatgctagggcagaagtatgtcaagtatgtcacatgaagaaaatgtgaaattcaagagtaatccacacgtgagaaactagacaatgtacattcatgtgttctcttgaaaggaaagggagagctgtaagcttcactctgtcctacaccggagaaaagcaggaataactttaccgtggaaataatgtttagcttttatcagagaaaattgtccttctagagcatagagtcccaaaactcaattctggttttcccctgttttttttttttttttttttcccaacatatgaactgcagcatatcactttttctttttgtgcctcaggttcctcacctgtaaaattgaaaaatatatgtattaataatattattaataataataatggtaatgtagtacttgtttgtaaagcactttgagatccttggttgaaaggcaccataggagtgccaagtattattatgtggccaagggggttatttaaactgtcagttcccaaaggccaggaaaggttggggtcatttttcttaaagacgagctgtaaatatcaactaggcagccaatagtgttgactatgaagatgcaaaactattactaggctgataaaatcatagtttcttaatggctaccaataaggcaaatatcacaataataaacgccaaattccttagggcggactatttgacaaccacatggaaaactttgggggaggcatgaggggggaacatctcaaaatgccaatgtaaaatttaacttacagcaatattcaccagcagaaaatgtctttcatatggaatgatttcatgttgctaagaaaaagaattcaatttgtagtcctgatttgaatactagaatgttggctataatagttctgttcttacaacacatgaaattttttcgttttattttattttgttttcatagtgcatgttcatttctactcacaaacatgttcttggtgtatttcttatgcaaacaatcttcaggcagcaaagatgtctgttacatctaaacttgaataataaagttttaccaccagttacaca

SEQ ID NO: 189 - DNA, 1985 bp, Homo sapiens
  Homo sapiens histone deacetylase 2 (HDAC2), mRNA
cgccgagctttcggcacctctgccgggtggtaccgagccttcccggcgccccctcctctcctcccaccggcctgcccttccccgcgggactatcgcccccacgtttccctcagcccttttctctcccggccgagccgcggcggcagcagcagcagcagcagcagcaggaggaggagcccggtggcggcggtggccggggagcccatggcgtacagtcaaggaggcggcaaaaaaaaagtctgctactactacgacggtgatattggaaattattattatggacagggtcatcccatgaagcctcatagaatccgcatgacccataacttgctgttaaattatggcttatacagaaaaatggaaatatataggccccataaagccactgccgaagaaatgacaaaatatcacagtgatgagtatatcaaatttctacggtcaataagaccagataacatgtctgagtatagtaagcagatgcatatatttaatgttggagaagattgtccagcgtttgatggactctttgagttttgtcagctctcaactggcggttcagttgctggagctgtgaagttaaaccgacaacagactgatatggctgttaattgggctggaggattacatcatgctaagaaatacgaagcatcaggattctgttacgttaatgatattgtgcttgccatccttgaattactaaagtatcatcagagagtcttatatattgatatagatattcatcatggtgatggtgttgaagaagctttttatacaacagatcgtgtaatgacggtatcattccataaatatggggaatactttcctggcacaggagacttgagggatattggtgctggaaaaggcaaatactatgctgtcaattttccaatgtgtgatggtatagatgatgagtcatatgggcagatatttaagcctattatctcaaaggtgatggagatgtatcaacctagtgctgtggtattacagtgtggtgcagactcattatctggtgatagactgggttgtttcaatctaacagtcaaaggtcatgctaaatgtgtagaagttgtaaaaacttttaacttaccattactgatgcttggaggaggtggctacacaatccgtaatgttgctcgatgttggacatatgagactgcagttgcccttgattgtgagattcccaatgagttgccatataatgattactttgagtattttggaccagacttcaaactgcatattagtccttcaaacatgacaaaccagaacactccagaatatatggaaaagataaaacagcgtttgtttgaaaatttgcgcatgttacctcatgcacctggtgtccagatgcaagctattccagaagatgctgttcatgaagacagtggagatgaagatggagaagatccagacaagagaatttctattcgagcatcagacaagcggatagcttgtgatgaagaattctcagattctgaggatgaaggagaaggaggtcgaagaaatgtggctgatcataagaaaggagcaaagaaagctagaattgaagaagataagaaagaaacagaggacaaaaaaacagacgttaaggaagaagataaatccaaggacaacagtggtgaaaaaacagataccaaaggaaccaaatcagaacagctcagcaacccctgaatttgacagtctcaccaatttcagaaaatcattaaaaagaaaatattgaaaggaaaatgttttctttttgaagacttctggcttcattttatactactttggcatggactgtatttattttcaaatgggactttttcgtttttgtttttctgggcaagttttattgtgagattttctaattatgaagcaaaatttcttttctccaccatgctttatgtgatagtatttaaaattgatgtgagttattatgtcaaaaaaactgatctattaaagaagtaattggcctttctgagctgaaaaaaaaaaaaaaaaag

SEQ ID NO: 190 - DNA, 2699 bp, Homo sapiens
  Homo sapiens DEK oncogene (DNA binding) (DEK), mRNA
  modified_base (1740): a, c, g, t, other or unknown
ggcccgcggcggccgaaatccgcggttcacagcatgtccgcctcggcccctgctgcggagggggagggaacccccacccagcccgcgtccgagaaagaacccgaaatgcccggtcccagagaggagagcgaggaggaagaggacgaggacgacgaggaggaggaggaggaggaaaaagaaaagagtctcatcgtggaaggcaagagggaaaagaaaaaagtagagaggttgacaatgcaagtctcttccttacagagagagccatttacaattgcacaaggaaaggggcagaaactttgtgaaattgagaggatacatttttttctaagtaagaagaaaaccgatgaacttagaaatctacacaaactgctttacaacaggccaggcactgtgtcctcattaaagaagaatgtgggtcagttcagtggctttccatttgaaaaaggaagtgtccaatataaaaagaaggaagaaatgttgaaaaaatttagaaatgccatgttaaagagcatctgtgaggttcttgatttggagagatcaggtgtaaatagtgaactagtgaagaggatcttgaatttcttaatgcatccaaagccttctggcaaaccattgccgaaatctaaaaaaacttgtagcaaaggcagtaaaaaggaacggaacagttctggaatggcaaggaaggctaagcgaaccaaatgtcctgaaattctgtcagatgaatctagtagtgatgaagatgaaaagaaaaacaaggaagagtcttcagatgatgaagataaagaaagtgaagaggagccaccaaaaaagacagccaaaagagaaaaacctaaacagaaagctacttctaaaagtaaaaaatctgtgaaaagtgccaatgttaagaaagcagatagcagcaccaccaagaagaatcaaaacagttccaaaaaagaaagtgagtctgaggatagttcagatgatgaacctttaattaaaaagttgaagaaaccccctacagatgaagagttaaaggaaacaataaagaaattactggccagtgctaacttggaagaagtcacaatgaaacagatttgcaaaaaggtctatgaaaattatcctacttatgatttaactgaaagaaaagatttcataaaaacaactgtaaaagagctaatttcttgagatagaggacagagaagatgactcgttcccatagatttgaagatctgatttataccattataccagcaaagagaatgtatttccttttctaaatccttgttaagcaacgttagtagaacttactgctgacctttttatcttgagtgttatgtgaatttgagtttgctgttttaaattgcatttctatgccatttttagtttaaaatcttgcatggcattaattgttccttgcttttatagttgtattttgtacattttggatttctttatataaggtcatagattcttgagctgttgtggtttttagtgcacttaatattagcttgcttaaggcatacttttaatcaagtagaacaaaaactattatcaccaggatttatacatacagagattgtagtatttagtatatgaaatattttgaatacacatctctgtcagtgtgaaaattcagcggcagtgtgtccatcatattaaaaatatacaagctacagttgtccagatcactgaattggaacttttctcctgcatgtgtatatatgtcaaattgtcagcatgacaaaagtgacagatgttattttngtatttttaaaaaacaattggttgtatataaagtttttttatttcttttgtgcagatcactttttaaactcacataggtaggtatctttatagttgtagactatggaatgtcagtgttcagccaaacagtatgatggaacagtgaaagtcaattcagtgatggcaacactgaaggaacagttaccctgctttgcctcgaaagtgtcatcaatttgtaattttagtattaactctgtaaaagtgtctgtaggtacgttttatattatataaggacagaccaaaaatcaacctatcaaagcttcaaaaactttgggaaagggtgggattaagtacaagcacatttggcttacagtaaatgaactgatttttattaactgcttttgcccatataaaatgctgatatttactggaaacctagccagcttcacgattatgactaaagtaccagattataatgccagaatataatgtgcaggcaatcgtggatgtctctgacaaagtgtgtctcaaaaataatatacttttacattaaagaaatttaatgtttctctggagttggggctcttggctttcagagtttggttaatcagtgttgattctagatgatcaacataatggaccactcctgaatgagacttaattttgtctttcaaatttactgtcttaaatcagtttattaaatctgaattttaaaacatgctgtttatgacacaatgacacatttgttgcaccaattaagtgttgaaaaatatctttgcatcatagaacagaaatatataaaaatatatgttgaatgttaacaggtattttcacaggtttgtttcttgatagttactcagacactagggaaaggtaaatacaagtgaacaaaataagcaactaaatgagacctaataattggccttcgattttaaatatttgttcttataaaccttgtcaataaaaataaatctaaatca

SEQ ID NO: 191 - DNA, 7940 bp, Homo sapiens
  Homo sapiens nuclear receptor co-repressor 1 (NCOR1), mRNA
ccaagatggcggccaaggtggcgaagcagcagccgcggcggcggcggcggctggagtgagcgtccgactcgccgcgccgaacgaggtcccggtgtagggccgcgcgccgtggccgcgtcccactcctcaggccggggcgcacgtcggctcccacgcttagccagctcccggtggtttcctagaaacatgattgtttattggcattgatctcacagtctggtgaggacttctttactgataatgtcaagttcaggttatcctcccaaccaaggagcattcagcacagaacaaagtcgttatcctcctcactctgtccagtatacatttcccaacacccgccaccagcaggagttcgcagtccctgattatcgttcctctcatcttgaagtgagtcaggcatcacagcttttgcagcaacagcagcagcaacagcttcgaaggcgaccttccttgctttcagaatttcacccaggttctgacaggcctcaagaaaggagaactagttatgaaccgtttcatccaggcccatccccagtggatcatgattcactggaatcgaagcgaccacgtctggaacaggtttctgattctcattttcagcgtgtcagtgctgcggttttgcctttagtgcacccgctgccagaagggctgagggcttctgcagatgctaagaaggatccagcattcggaggcaaacatgaagctccatcctctccaatttcggggcaaccatgtggagatgatcaaaatgcttcaccttcaaaactctcaaaggaagagttaatacagagtatggatcgtgtagatcgagaaattgcaaaagtagaacagcagatccttaaactgaaaaagaaacaacaacagcttgaagaagaggcagctaaacctcctgagcctgagaagcccgtgtcccctcctcctgtggagcagaaacaccgcagtattgtccaaattatttatgatgagaatcggaaaaaagcagaagaagctcataaaatttttgaaggtcttggcccaaaagttgaactgccactgtataaccagccatcagataccaaggtgtaccatgagaacatcaagacaaaccaggtgatgaggaaaaaactcattttattttttaaaagaagaaatcatgcaagaaaacaaagggaacaaaaaatctgccagcgttatgatcagctcatggaggcatgggagaaaaaagtggacagaatagaaaataatcctcggaggaaagctaaagaaagcaaaacaagggaatactatgaaaagcagtttccagaaattcgaaaacaaagagaacagcaagaaagatttcagcgagttgggcagaggggagctggtctttcagccaccattgctaggagtgagcatgagatttctgaaattattgatgggctctctgagcaggagaataatgagaaacaaatgcggcagctctctgtgattccacctatgatgtttgatgcagaacaaagacgagtcaagttcattaacatgaatgggcttatggaggaccctatgaaagtgtataaagataggcagtttatgaatgtttggactgaccatgaaaaggagatctttaaggacaagtttatccagcatccaaaaaactttggactaattgcatcatacttggagaggaagagtgttcctgattgtgttttgtattactatttaaccaagaaaaatgagaattataaagccctcgtcagaaggaattatgggaaacgcagaggcagaaaccagcaaattgctcgaccctcgcaagaagaaaaagtagaagaaaaagaagaggataaagcagaaaaaacagaaaaaaaagaagaagaaaagaaagatgaagaggaaaaagatgaaaaagaagactccaaagaaaataccaaggaaaaggacaagatagatggtacagcagaagaaactgaggaaagagagcaagccacaccccgggggcgaaagactgccaacagtcagggccgccgtaagggccggatcaccaggtccatgacaaacgaagctgcagctgccagtgctgcagccgcagcggctactgaagagcccccaccacctctgccaccgccaccagaacccatttctacagagcctgtggagacctctcgatggacagaagaagaaatggaagttgctaaaaaaggtctagtagaacatggtcgtaactgggcagcaattgctaaaatggtgggaacgaaaagtgaagctcaatgtaaaaacttctattttaactataaaaggcgacacaatcttgacaacctcttacagcagcataaacagaaaacttcacgaaaacctcgtgaagagcgagatgtgtctcaatgtgaaagtgtcgcttccactgtttctgctcaggaggatgaagatattgaagcctccaatgaagaagaaaatccagaagacagcgaagttgaagctgtcaagcccagcgaggacagtcctgaaaatgctacttctcgaggaaacacagaacctgcggttgagcttgagcccaccacggaaactgcacccagtacatctccctccttagcagttccaagtacaaaaccagctgaagatgaaagtgtggagacccaggtgaatgacagcatcagtgctgagacagcagagcagatggatgtagatcagcaggagcacagtgctgaagagggttctgtttgtgatcccccacccgctaccaaagctgactctgtggacgttgaagtgagggtgccagaaaaccatgcatctaaagttgaaggtgataataccaaagaaagagacttggatagagccagtgagaaggtggaacctagagatgaagatttggtggtagctcagcaaataaatgcccaaaggcccgagccccagtcagacaatgattccagtgccacgtgcagcgctgatgaggatgtggatggagagccagagaggcagagaatgtttcctatggactcaaagccttcactgttaaaccccactggatctatactcgtctcatctccgttaaaaccaaatccactggatctgccacagcttcagcatcgagctgctgttatcccaccaatggtatcctgcaccccatgtaacataccaattggaaccccagtgagcggctatgctctctaccagcgacacattaaagcaatgcatgagtcagcactcctggaggagcagcggcagagacaagaacagatagatttggaatgtagaagttctacaagtccatgtggcacatccaagagtccaaacagagagtgggaagtccttcagcctgctccacatcaattgataactaatctccctgaaggcgttcggcttccgacaactcgaccaaccaggccaccgccccctctcatcccgtcatccaaaaccacagtggcttcagaaaaaccatcttttataatgggaggctccatctcacagggaacaccaggcacttatttgacttctcataatcaggcttcctacactcaagaaacacccaagccgtcagtaggatctatctctcttggactgccacggcaacaggaatctgccaaatcagctactttgccctacatcaagcaggaagaattttctccccgaagccaaaactcacaacctgagggtctgttggtcagggcccaacatgaaggtgtagtcagaggtaccgcaggagccatacaagaaggaagtataactcggggaactccaaccagcaaaatttcagtggagagcattccatccctacggggctctatcactcagggcaccccggctctgccccagactggcataccaacagaggctttggtgaaggggtccatttcgagaatgcccattgaagacagcagtcctgagaaaggcagagaggaagctgcatccaaaggccatgttatttatgaaggcaaaagtggacatatcttgtcatatgataatattaagaatgcccgagaagggactaggagtccaagaacagctcatgaaatcagtttaaagagaagctatgaatcagtggaaggaaatataaagcaagggatgtcaatgagggagtctcctgtatcagcaccgttagaggggctgatatgccgagcattacccagggggagtcctcattctgacctcaaagaaaggactgtattgtctggctccataatgcaggggacaccaagagcaacaactgaaagctttgaagatggccttaaatatcccaaacaaattaaaagggaaagtcctcccatacgagcatttgaaggtgccattaccaaaggaaaaccatatgatggcatcaccaccatcaaagaaatggggcgttccattcatgagattccaaggcaagatattttaactcaggaaagtcggaaaactccagaagtggtccagagcacacggccgataattgagggttccatttcccagggcacaccaataaagtttgacaacaactcaggtcaatctgccatcaaacacaatgtcaaatccttaatcacggggcctagcaaactatcccgtggaatgcctccgctggaaattgtgccagagaacataaaagtggtagaacggggaaaatatgaggatgtgaaagcaggcgagaccgtgcgttcccggcacacgtcagtggtaagctctggcccctccgttcttaggtccacactgcatgaagctcccaaagcacaactgagccctgggatttatgatgacaccagtgcacggaggacccctgtgagttatcaaaacaccatgtccagaggctcacccatgatgaacagaacttctgatgttacaattcctcctaacaagtctaccaatcatgaaaggaaatcgacactgacccctacccagagggaaagtatcccagcgaagtctccagtgcctggggtggaccctgtcgtgagccacagtccgtttgatccccatcacagaggcagcactgcaggcgaggtttattggagccacctgcccacgcaattggatccagccatgccttttcacagggctttggatcctgcagcggctgcttacctgtttcagagacagctttcaccaactccaggttacccaagtcagtatcagctttacgcaatggagaacacaagacagacaatcttaaatgattacattacctcacaacagatgcaagtgaacttgcgtccagatgtggccagaggactctccccaagagagcagccactgggtctcccatacccagcaacgagaggaatcattgacctgaccaatatgcctccaacaattttagtgcctcatccagggggaacaagcactcctcccatggacagaatcacttatattcctggtacacagattactttccctcccaggccgtacaactctgcttccatgtctccaggacacccaacacaccttgcagctgctgcaagtgctgagagggaacgggaacgggagcgggagaaggagcgggagcgggaacggattgctgcagcttcctccgacctctacctgcggccaggctcagaacagcctggccgacctggcagtcatggatatgttcgctccccttccccttcagtaagaactcaggagaccatgttgcaacagagacccagtgttttccaaggaaccaatggaaccagtgtaatcacacctttggatccaactgctcagctacgaatcatgccactgcctgctgggggcccttcaataagccaaggcctgccagcctcccgttacaacactgctgcggatgccctggctgctcttgtggatgctgcagcttctgcaccccagatggatgtgtccaaaacaaaagagagtaagcatgaagctgccaggttagaagaaaatttgagaagcaggtcagcagcagttagtgaacagcagcagctagagcagaaaaccctggaggtggagaagagatctgttcagtgtttatacacttcttcagcctttccaagtggcaagccccagcctcattcttcagtagtttattctgaggctgggaaagataaagggcctcctccaaaatccagatatgaggaagagctaaggaccagagggaagactaccattactgcagctaacttcatagacgtgatcatcacccggcaaattgcctcggacaaggatgcgagggaacgtggctctcaaagttcagactcttctagtagcttatcttctcacaggtatgaaacacctagcgatgctattgaggtgataagtcctgccagctcacctgcgccaccccaggagaaactgcagacctatcagccagaggttgttaaggcaaatcaagcggaaaatgatcctaccagacaatatgaaggaccattacatcactatcgaccacagcaggaatcaccatctccccaacaacagctgcccccttcttcacaggcagagggaatggggcaagtgcccaggacccatcggctgatcacacttgctgatcacatctgtcaaattatcacacaagattttgctagaaatcaagtttcctcgcagactccccagcagcctcctacttctacattccagaactcaccttctgctttggtatctacacctgtgaggactaaaacatcaaaccgttacagcccagaatcccaggctcagtctgtccatcatcaaagaccaggttcaagggtctctccagaaaatcttgtggacaaatccaggggaagtaggcctggaaaatccccagagaggagtcacgtctcttccgagccctacgagcccatctccccaccccaggttccggttgtgcatgagaaacaggacagcttgctgctcttgtctcagaggggcgcagagcctgcagagcagaggaatgatgcccgctcaccagggagtataagctacttgccttcattcttcaccaagcttgaaaatacatcacccatggttaaatcaaagaagcaggagatttttcgtaagttgaactcctctggtggaggtgactctgatatggcagctgctcagccaggaactgagatctttaatctgccagcagttactacgtcaggctcagttagctctagaggccattcttttgctgatcctgccagtaatcttgggctggaagacattatcaggaaggctctcatgggaagctttgatgacaaagttgaggatcatggagttgtcatgtcccagcctatgggagtagtgcctggtactgccaacacctcagttgtgaccagtggtgagacacgaagagaggaaggggacccatcacctcattcaggaggagtttgcaaaccaaagctgatcagcaagtcaaacagcaggaaatctaagtctcctatacctgggcaaggctacttaggaacggaacggccctcttcagtctcctctgtacattcagaaggggattaccataggcagacgccagggtgggcctgggaagacaggccctcttcaacaggctcaactcagtttccttataaccctctgactatgcggatgctcagcagtactccaccaacaccgattgcatgtgctccctctgcggtgaaccaagcagctcctcaccaacagaacaggatctgggagcgagagcctgccccactgctctcagcacagtacgagaccctgtcggatagtgatgactgaactgcacaaagtgaggggaacagggtgcaggagagggatctctagtttttgtggtttaatttttagtagcaggtcaaaaacctgccctcctgtgacttattccctgagacttttcaggagagccagcccacagatgatgaagaaatgatggaagttcatttggagagtcaaatgggaaaaaaacaaacaaaaaactgcctttgatacaggcaattcagtggactataataatagtggagggttgagatgtagagtttttaaaaagtgaacagttgctgttcttacatctgtaaagaaaaccataatgtctttaaatcactcttctgtaaatagatgacctttttgcagtgtaaaaaaaaaaaaaaaaaaaaaaaaaa

SEQ ID NO: 192 - DNA, 1558 bp, Homo sapiens
  Homo sapiens MyoD family inhibitor (MDFI), mRNA
cagcgagtgagaggggaaggggcgccaggcgagcacccgggagccagcgggacctgggcaggggcgcccggagcaggcgcgcatggcgggccccgcgcggggatccggctggaagagagcgtagcacggctcgcacgagtccggggccgatgtaccaggtgagcggccagcgcccctctggctgcgacgcgccctatggagcccccagcgcagccccgggcccagcccagaccctatccctccttcctgggctggaggtagtaacaggatccactcaccctgcggaggcagcaccagaggagggctccctggaggaggcggcaacccccatgccccaaggcaatggccctggcatcccccagggcctggacagcactgacctcgacgtccccacagaagctgttacatgccagcctcaggggaaccccttgggctgcaccccacttctgccgaatgactctggccacccctcagagctgggcggcaccagacgggcggggaatggtgccctgggtggccccaaggcccaccggaagttgcagacacacccatctctcgccagccagggcagcaagaagagtaagagcagcagcaaatccaccacctcccagatccccctccaggcacaggaagactgctgtgtccactgcatcctgtcctgcctgttctgcgagttcctgacgctgtgcaacatcgtcctggactgcgccacctgtggctcctgcagctcggaggactcgtgcctctgctgctgctgctgtggctctggcgagtgtgccgactgcgacctgccctgcgacctggactgcggcatcctggatgcctgctgcgagtccgcggactgcctggagatctgcatggagtgctgtgggctctgcttctcctcctgagcctctgtcgggggctaagccagcctggcgcccctgcagattccagcagggtccctctgagtggggccaggcccaggactgtcacacaaggcttgagaagccccctctccctggtcctctcctacccacccatgtcctctcagaaccccagccttgaaaatagtggggggcactcagaggggccacctcctcagccgtgggtggtgggcccatggcagagaagcctgaactctttactgggttaccaggttcatacattgctgaggacctgacaggacaacctaggggcagggctggggtgggggccgcagagggcagccagggctggggaacactgtgaaagttacttggggagggtgggccggtggggccgtagctctctacctctccctgctcctggtgcctgcctctctcctccaccccaggcttagaggacagaaaaatgtgaagagacgccccacccaccctcagccagccctctccagtctcctttcctaggcttttttgggggcctaacccacgcagtcaccccagagggcagggctaggcgagagcctggggtggggcgggagggggaacagtatggaaaagactggaaggggaaaggaagggaagggagggaggtctgttctatctgttgctgtaaataaagatatttgtccatctct

SEQ ID NO: 193 - DNA, 1593 bp, Homo sapiens
  Homo sapiens GNAS complex locus (GNAS), transcript variant 1, mRNA
ccgccgccgccgcagcccggccgcgccccgccgccgccgccgccgccatgggctgcctcgggaacagtaagaccgaggaccagcgcaacgaggagaaggcgcagcgtgaggccaacaaaaagatcgagaagcagctgcagaaggacaagcaggtctaccgggccacgcaccgcctgctgctgctgggtgctggagaatctggtaaaagcaccattgtgaagcagatgaggatcctgcatgttaatgggtttaatggagagggcggcgaagaggacccgcaggctgcaaggagcaacagcgatggtgagaaggcaaccaaagtgcaggacatcaaaaacaacctgaaagaggcgattgaaaccattgtggccgccatgagcaacctggtgccccccgtggagctggccaaccccgagaaccagttcagagtggactacatcctgagtgtgatgaacgtgcctgactttgacttccctcccgaattctatgagcatgccaaggctctgtgggaggatgaaggagtgcgtgcctgctacgaacgctccaacgagtaccagctgattgactgtgcccagtacttcctggacaagatcgacgtgatcaagcaggctgactatgtgccgagcgatcaggacctgcttcgctgccgtgtcctgacttctggaatctttgagaccaagttccaggtggacaaagtcaacttccacatgtttgacgtgggtggccagcgcgatgaacgccgcaagtggatccagtgcttcaacgatgtgactgccatcatcttcgtggtggccagcagcagctacaacatggtcatccgggaggacaaccagaccaaccgcctgcaggaggctctgaacctcttcaagagcatctggaacaacagatggctgcgcaccatctctgtgatcctgttcctcaacaagcaagatctgctcgctgagaaagtccttgctgggaaatcgaagattgaggactactttccagaatttgctcgctacactactcctgaggatgctactcccgagcccggagaggacccacgcgtgacccgggccaagtacttcattcgagatgagtttctgaggatcagcactgccagtggagatgggcgtcactactgctaccctcatttcacctgcgctgtggacactgagaacatccgccgtgtgttcaacgactgccgtgacatcattcagcgcatgcaccttcgtcagtacgagctgctctaagaagggaacccccaaatttaattaaagccttaagcacaattaattaaaagtgaaacgtaattgtacaagcagttaatcacccaccatagggcatgattaacaaagcaacctttcccttcccccgagtgattttgcgaaacccccttttcccttcagcttgcttagatgttccaaatttagaaagcttaaggcggcctacagaaaaaggaaaaaaggccacaaaagttccctctcactttcagtaaaaataaataaaacagcagcagcaaacaaataaaatgaaataaaagaaacaaatgaaataaatattgtgttgtgcagcattaaaaaaaatcaaaataaaaattaaatgtgagcaaag

SEQ ID NO: 194 - DNA, 1504 bp, Homo sapiens
  Homo sapiens calponin 1, basic, smooth muscle (CNN1), mRNA
tgcagacggaacttcagccgctgcctctgttctcagcgtcagtgccgccactgcccccgccagagcccaccggccagcatgtcctctgctcacttcaaccgaggccctgcctacgggctgtcagccgaggttaagaacaagctggcccagaagtatgaccaccagcgggagcaggagctgagagagtggatcgagggggtgacaggccgtcgcatcggcaacaacttcatggacggcctcaaagatggcatcattctttgcgaattcatcaataagctgcagccaggctccgtgaagaagatcaatgagtcaacccaaaattggcaccagctggagaacatcggcaacttcatcaaggccatcaccaagtatggggtgaagccccacgacatttttgaggccaacgacctgtttgagaacaccaaccatacacaggtgcagtccaccctcctggctttggccagcatggcgaagacgaaaggaaacaaggtgaacgtgggagtgaagtacgcagagaagcaggagcggaaattcgagccggggaagctaagagaagggcggaacatcattgggcttcagatgggcagcaacaagtttgccagccagcagggcatgacggcctatggcacccggcgccacctctacgaccccaagctgggcacagaccagcctctggaccaggcgaccatcagcctgcagatgggcaccaacaaaggagccagccaggctggcatgactgcgccagggaccaagcggcagatcttcgagccggggctgggcatggagcactgcgacacgctcaatgtcagcctgcagatgggcagcaacaagggcgcctcgcagcggggcatgacggtgtatgggctgccacgccaggtctacgaccccaagtactgtctgactcccgagtacccagagctgggtgagcccgcccacaaccaccacgcacacaactactacaattccgcctaggtccacaaggccttcactgttttccccccaagggaggctgctgctgctcttggctggagccagccagggccagccgaccccctctccctgcatggcatcctccagcccctgtagaactcaacctctacagggttagagtttggagagagcagactggcggggggcccattggggggaaggggaccctccgctctgtagtgctacagggtccaacatagaacagggtgtccccaacagcgcccaaaggacgcactgagcaacgctattccagctgtccccccactccctcacaagtgggtacccccaggaccagaagctcccccagcaaagcccccagagcccaggctcggcctgcccccaccccattcccgcagtgggagcaaactgcatgcccagagacccagcggacacacgcggtttggtttgcagcgactggcatactatgtggatgtgacagtggcgtttgtaatgagagcactttcttttttttctatttcactggagcacaataaatggctgtaaaatctacacg

SEQ ID NO: 195 - DNA, 2347 bp, Homo sapiens
  Homo sapiens SH3-domain binding protein 2 (SH3BP2), mRNA
ggggaggagccggcggctgccaggccagggccggcgggcatggcgggctccgggccggccgcggagctggggccggcgggaggcgggcgcccgggacgaggcggcggcggccgggggacgcggcccggggccgtgccggtgctcgcaggggaggcgggcgtggatcgccccggggaagccggccatgcccgccgcgtggacgcccttcatggcggctgaagagatgcattggcctgtccctatgaaggccattggtgcccagaacctgctaaccatgcctgggggcgtggccaaggctggctacctgcacaagaagggcggtacccagctgcagctgctgaaatggcccctgcgctttgtcatcatccacaaacgctgcgtctactacttcaagagtagcacctctgcctccccgcagggcgccttctccctgagtggctataaccgggtgatgcgggcggctgaggagaccacgtccaacaacgttttccccttcaagatcatccacatcagcaagaagcaccgcacgtggttcttctcggcctcctctgaggaggagcgcaagagctggatggccttgctgcgcagggagattggccacttccacgaaaagaaagacctgcccttggacaccagcgactccagctcggacacagacagcttctacggcgcagttgagcggcctgtggatatcagcctttccccgtaccccacggacaatgaagactatgagcacgacgatgaggatgactcctacctggagcctgactccccggagcccggaaggcttgaggatgccctgatgcacccaccggcttacccaccacccccagtgcccacgcccaggaagccagccttctctgacatgccccgggcccactcctttacctccaagggccccggtcccctactgccacccccgccccctaagcacggcctcccagatgttggcctggcggctgaggactccaagagggacccactgtgcccgaggcgggctgagccttgccccagggtacctgctaccccccgaaggatgagcgatccccctctgagcaccatgcccaccgcacccggcctccggaaacccccttgcttccgggagagtgccagccccagcccggagccctggacccctggccacggggcctgctccacttccagtgctgccatcatggccactgccacctccagaaactgtgacaaactcaagtccttccacctgtccccccgaggaccacccacatctgagcccccacctgtgccagccaacaagcccaagttcctgaagatagctgaagaggaccccccaagggaggcagccatgcccggactctttgtgccccccgtggctccccggcctcctgcgctgaagctgccagtgcctgaggccatggcgcggcccgcagtcctgcccaggccagagaagccgcagctcccgcacctccagcgatcaccccccgatgggcagagtttcaggagcttctcctttgaaaagccccggcaaccctcacaggctgacactggcggggacgactcggacgaggactatgagaaggtgccactgcccaactcggtcttcgtcaacaccacggagtcctgcgaagtggaaaggttgttcaaggctacaagcccccggggagagccccaggatggactctactgcatccggaactcctctaccaagtcggggaaggtcctggttgtgtgggacgaaacctctaacaaagtgaggaactatcgcatttttgagaaggactctaagttctacctggagggcgaggtcctgtttgtgagtgtgggcagcatggtggagcactaccacacccacgtgctgcccagccaccagagcctgctgctgcggcacccctacggctacactgggcctaggtgatggcagtccatgtggctgccaggccaaggcagtcacaggggccctgaccccaggccacacagacggacatgggcccacatgggagggtgagcaggagcaaggcggtgcttgcctagggcctgtgatggacatctcgtaggacccagccagtctcatccagcaggttgggttctagggctgaaccaggcgccaggctccagaggacgaagggactctgttgccccacactaacttgccctgtcccaatcccagaaacccaggaccaagctgtgcctgggctccaaggacaggaacactggtccccccatcacactcacccctaagtgggctgggagccaggcagggccagggcagctgggtgggggccggggctggccctgggacccccaggaacgctaagacacaggctccagtaggggctgttgcctccaataaagcagcagtgagctttgc

SEQ ID NO: 196 - DNA, 1206 bp, Homo sapiens
  Homo sapiens transducer of ERBB2, 1 (TOB1), mRNA
gttgctgtcggggagttgaaacctaattttgtggcgtagagctatgcagcttgaaatccaagtagcactaaattttattatttcgtatttgtacaataagcttcccaggagacgtgtcaacatttttggtgaagaacttgaaagacttcttaagaagaaatatgaagggcactggtatcctgaaaagccatacaaaggatcggggtttagatgtatacacataggggagaaagtggacccagtgattgaacaagcatccaaagagagtggtttggacattgatgatgttcgtggcaatctgccacaggatcttagtgtttggatcgacccatttgaggtttcttaccaaattggtgaaaagggaccagtgaaggtgctttacgtggatgataataatgaaaatggatgtgagttggataaggagatcaaaaacagctttaacccagaggcccaggtttttatgcccataagtgacccagcctcatcagtgtccagctctccatcgcctccttttggtcactctgctgctgtaagccctaccttcatgccccggtccactcagcctttaacctttaccactgccacttttgctgccaccaagttcggctctaccaaaatgaagaatagtggccgtagcaacaaggttgcacgtacttctcccatcaacctcggcttgaatgtgaatgacctcttgaagcagaaagccatctcttcctcaatgcactctctgtatgggcttggcttgggtagccagcagcagccacagcaacagcagcagccagcccagccgccaccgccaccaccaccaccacagcagcaacaacagcagaaaacctctgctctttctcctaatgccaaggaatttatttttcctaatatgcagggtcaaggtagtagtaccaatggaatgttcccaggtgacagcccccttaacctcagtcctctccagtacagtaatgcctttgatgtgtttgcagcctatggaggcctcaatgagaagtcttttgtagatggcttgaattttagcttaaataacatgcagtattctaaccagcaattccagcctgttatggctaactaaaaaaaagaaaatgtatcgtacaagttaaaatgcacgggcccaagggggattttttttttcacctccttgagaatttttttttttttaagcttatagtaaggatacattcaagcttgggttaaaaa

SEQ ID NO: 197 - DNA, 1382 bp, Homo sapiens
  Homo sapiens secreted frizzled-related protein 2 (SFRP2), mRNA.
ccgggtcggagccccccggagctgcgcgcgggcttgcagcgcctcgcccgcgctgtcctcccggtgtcccgcttctccgcgccccagccgccggctgccagcttttcggggccccgagtcgcacccagcgaagagagcgggcccgggacaagctcgaactccggccgcctcgcccttccccggctccgctccctctgccccctcggggtcgcgcgcccacgatgctgcagggccctggctcgctgctgctgctcttcctcgcctcgcactgctgcctgggctcggcgcgcgggctcttcctctttggccagcccgacttctcctacaagcgcagcaattgcaagcccatccctgccaacctgcagctgtgccacggcatcgaataccagaacatgcggctgcccaacctgctgggccacgagaccatgaaggaggtgctggagcaggccggcgcttggatcccgctggtcatgaagcagtgccacccggacaccaagaagttcctgtgctcgctcttcgcccccgtctgcctcgatgacctagacgagaccatccagccatgccactcgctctgcgtgcaggtgaaggaccgctgcgccccggtcatgtccgccttcggcttcccctggcccgacatgcttgagtgcgaccgtttcccccaggacaacgacctttgcatccccctcgctagcagcgaccacctcctgccagccaccgaggaagctccaaaggtatgtgaagcctgcaaaaataaaaatgatgatgacaacgacataatggaaacgctttgtaaaaatgattttgcactgaaaataaaagtgaaggagataacctacatcaaccgagataccaaaatcatcctggagaccaagagcaagaccatttacaagctgaacggtgtgtccgaaagggacctgaagaaatcggtgctgtggctcaaagacagcttgcagtgcacctgtgaggagatgaacgacatcaacgcgccctatctggtcatgggacagaaacagggtggggagctggtgatcacctcggtgaagcggtggcagaaggggcagagagagttcaagcgcatctcccgcagcatccgcaagctgcagtgctagtcccggcatcctgatggctccgacaggcctgctccagagcacggctgaccatttctgctccgggatctcagctcccgttccccaagcacactcctagctgctccagtctcagcctgggcagcttccccctgccttttgcacgtttgcatccccagcatttcctgagttataaggccacaggagtggatagctgttttcacctaaaggaaaagcccacccgaatcttgtagaaatattcaaactaataaaatcatgaatatttttatgaagttt

SEQ ID NO: 198 - DNA, 1970 bp, Homo sapiens
  Homo sapiens wingless-type MMTV integration site family, member 2B (WNT2B), transcript variant WNT-2B2
cgggagtcttcggggagctatgctgagaccgggtggtgcggaggaagctgcgcagctcccgcttcggcgcgccagcgccccggtccctgtgccgtcgcccgcggcccccgacggctcccgggcttcggcccgcctaggtcttgcctgccttctgctcctgctgctgctgacgctgccggcccgcgtagacacgtcctggtggtacattggggcactgggggcacgagtgatctgtgacaatatccctggtttggtgagccggcagcggcagctgtgccagcgttacccagacatcatgcgttcagtgggcgagggtgcccgagaatggatccgagagtgtcagcaccaattccgccaccaccgctggaactgtaccaccctggaccgggaccacaccgtctttggccgtgtcatgctcagaagtagccgagaggcagcttttgtatatgccatctcatcagcaggggtagtccacgctattactcgcgcctgtagccagggtgaactgagtgtgtgcagctgtgacccctacacccgtggccgacaccatgaccagcgtggggactttgactggggtggctgcagtgacaacatccactacggtgtccgttttgccaaggccttcgtggatgccaaggagaagaggcttaaggatgcccgggccctcatgaacttacataataaccgctgtggtcgcacggctgtgcggcggtttctgaagctggagtgtaagtgccatggcgtgagtggttcctgtactctgcgcacctgctggcgtgcactctcagatttccgccgcacaggtgattacctgcggcgacgctatgatggggctgtgcaggtgatggccacccaagatggtgccaacttcaccgcagcccgccaaggctatcgccgtgccacccggactgatcttgtctactttgacaactctccagattactgtgtcttggacaaggctgcaggttccctaggcactgcaggccgtgtctgcagcaagacatcaaaaggaacagacggttgtgaaatcatgtgctgtggccgagggtacgacacaactcgagtcacccgtgttacccagtgtgagtgcaaattccactggtgctgtgctgtacggtgcaaggaatgcagaaatactgtggacgtccatacttgcaaagcccccaagaaggcagagtggctggaccagacctgaacacacagatacctcactcatccctccaattcaagcctctcaactcaaaagcacaagatccttgcatgcacaccttcctccaccctccaccctgggctgctaccgcttctatttaaggatgtagagagtaatccatagggaccatggtgtcctggctggttccttagccctgggaaggagttgtcaggggatataagaaactgtgcaagctccctgatttcccgctctggagatttgaagggagagtagaagagatagggggtctttagagtgaaatgagttgcactaaagtacgtagttgaggctccttttttctttcctttgcaccagcttcccgacacttcttggtgtgcaagaggaagggtacctgtagagagcttctttttgtttctacctggccaaagttagatgggacaaagatgaatggcatgtcccttctctgaagtccgtttgagcagaactacctggtaccccgaaagaaaaatcttaggctaccacattctattattgagagcctgagatgttagccatagtggacaaggttccattcacatgctcatatgtttataaactgtgttttgtagaagaaaaagaatcataacaatacaaacacacattcattctctctttttctctctaccattctcaacctgtattggacagcactgcctcttttgcttacttgctgcctgttcaaactgaggtggaatgcagtggttcccatgcttaacagatcattaaaacaccctagaacactcctaggatagattaatgt

SEQ ID NO: 199 - DNA, 2014 bp, Homo sapiens
  Homo sapiens wingless-type MMTV integration site family, member 2B (WNT2B), transcript variant WNT-2B1, mRNA.
aaaccctgaagagcccaagcaatgtggttgtaaaatttgcaaaataagattaaatcttaactgcaatctgttaacactgctgtctcctttcactctttctcctatatcacactttcccacatgttggatggccttggagtggtagccataagcatttttggaattcaactaaaaactgaaggatccttgaggacggcagtacctggcatacctacacagtcagcgttcaacaagtgtttgcaaaggtacattggggcactgggggcacgagtgatctgtgacaatatccctggtttggtgagccggcagcggcagctgtgccagcgttacccagacatcatgcgttcagtgggcgagggtgcccgagaatggatccgagagtgtcagcaccaattccgccaccaccgctggaactgtaccaccctggaccgggaccacaccgtctttggccgtgtcatgctcagaagtagccgagaggcagcttttgtatatgccatctcatcagcaggggtagtccacgctattactcgcgcctgtagccagggtgaactgagtgtgtgcagctgtgacccctacacccgtggccgacaccatgaccagcgtggggactttgactggggtggctgcagtgacaacatccactacggtgtccgttttgccaaggccttcgtggatgccaaggagaagaggcttaaggatgcccgggccctcatgaacttacataataaccgctgtggtcgcacggctgtgcggcggtttctgaagctggagtgtaagtgccatggcgtgagtggttcctgtactctgcgcacctgctggcgtgcactctcagatttccgccgcacaggtgattacctgcggcgacgctatgatggggctgtgcaggtgatggccacccaagatggtgccaacttcaccgcagcccgccaaggctatcgccgtgccacccggactgatcttgtctactttgacaactctccagattactgtgtcttggacaaggctgcaggttccctaggcactgcaggccgtgtctgcagcaagacatcaaaaggaacagacggttgtgaaatcatgtgctgtggccgagggtacgacacaactcgagtcacccgtgttacccagtgtgagtgcaaattccactggtgctgtgctgtacggtgcaaggaatgcagaaatactgtggacgtccatacttgcaaagcccccaagaaggcagagtggctggaccagacctgaacacacagatacctcactcatccctccaattcaagcctctcaactcaaaagcacaagatccttgcatgcacaccttcctccaccctccaccctgggctgctaccgcttctatttaaggatgtagagagtaatccatagggaccatggtgtcctggctggttccttagccctgggaaggagttgtcaggggatataagaaactgtgcaagctccctgatttcccgctctggagatttgaagggagagtagaagagatagggggtctttagagtgaaatgagttgcactaaagtacgtagttgaggctccttttttctttcctttgcaccagcttcccgacacttcttggtgtgcaagaggaagggtacctgtagagagcttctttttgtttctacctggccaaagttagatgggacaaagatgaatggcatgtcccttctctgaagtccgtttgagcagaactacctggtaccccgaaagaaaaatcttaggctaccacattctattattgagagcctgagatgttagccatagtggacaaggttccattcacatgctcatatgtttataaactgtgttttgtagaagaaaaagaatcataacaatacaaacacacattcattctctctttttctctctaccattctcaacctgtattggacagcactgcctcttttgcttacttgctgcctgttcaaactgaggtggaatgcagtggttcccatgcttaacagatcattaaaacaccctagaacactcctaggatagattaatgt

SEQ ID NO: 200 - DNA, 2301 bp, Homo sapiens
  Homo sapiens wingless-type MMTV integration site family member 2 (WNT2), mRNA
agcagagcggacgggcgcgcgggaggcgcgcagagctttcgggctgcaggcgctcgctgccgctggggaattgggctgtgggcgaggcggtccgggctggcctttatcgctcgctgggcccatcgtttgaaactttatcagcgagtcgccactcgtcgcaggaccgagcggggggcgggggcgcggcgaggcggcggccgtgacgaggcgctcccggagctgagcgcttctgctctgggcacgcatggcgcccgcacacggagtctgacctgatgcagacgcaagggggttaatatgaacgcccctctcggtggaatctggctctggctccctctgctcttgacctggctcacccccgaggtcaactcttcatggtggtacatgagagctacaggtggctcctccagggtgatgtgcgataatgtgccaggcctggtgagcagccagcggcagctgtgtcaccgacatccagatgtgatgcgtgccattagccagggcgtggccgagtggacagcagaatgccagcaccagttccgccagcaccgctggaattgcaacaccctggacagggatcacagcctttttggcagggtcctactccgaagtagtcgggaatctgcctttgtttatgccatctcctcagctggagttgtatttgccatcaccagggcctgtagccaaggagaagtaaaatcctgttcctgtgatccaaagaagatgggaagcgccaaggacagcaaaggcatttttgattggggtggctgcagtgataacattgactatgggatcaaatttgcccgcgcatttgtggatgcaaaggaaaggaaaggaaaggatgccagagccctgatgaatcttcacaacaacagagctggcaggaaggctgtaaagcggttcttgaaacaagagtgcaagtgccacggggtgagcggctcatgtactctcaggacatgctggctggccatggccgacttcaggaaaacgggcgattatctctggaggaagtacaatggggccatccaggtggtcatgaaccaggatggcacaggtttcactgtggctaacgagaggtttaagaagccaacgaaaaatgacctcgtgtattttgagaattctccagactactgtatcagggaccgagaggcaggctccctgggtacagcaggccgtgtgtgcaacctgacttcccggggcatggacagctgtgaagtcatgtgctgtgggagaggctacgacacctcccatgtcacccggatgaccaagtgtgggtgtaagttccactggtgctgcgccgtgcgctgtcaggactgcctggaagctctggatgtgcacacatgcaaggcccccaagaacgctgactggacaaccgctacatgaccccagcaggcgtcaccatccaccttcccttctacaaggactccattggatctgcaagaacactggacctttgggttctttctggggggatatttcctaaggcatgtggcctttatctcaacggaagccccctcttcctccctgggggccccaggatggggggccacacgctgcacctaaagcctaccctattctatccatctcctggtgttctgcagtcatctcccctcctggcgagttctctttggaaatagcatgacaggctgttcagccgggagggtggtgggcccagaccactgtctccacccaccttgacgtttcttctttctagagcagttggccaagcagaaaaaaaagtgtctcaaaggagctttctcaatgtcttcccacaaatggtcccaattaagaaattccatacttctctcagatggaacagtaaagaaagcagaatcaactgcccctgacttaactttaacttttgaaaagaccaagacttttgtctgtacaagtggttttacagctaccacccttagggtaattggtaattacctggagaagaatggctttcaatacccttttaagtttaaaatgtgtatttttcaaggcatttattgccatattaaaatctgatgtaacaaggtggggacgtgtgtcctttggtactatggtgtgttgtatctttgtaagagcaaaagcctcagaaagggattgctttgcattactgtccccttgatataaaaaatctttagggaatgagagttccttctcacttagaatctgaagggaattaaaaagaagatgaatggtctggcaatattctgtaactattgggtgaatatggtggaaaataatttagtggatggaatatcagaagtatatctgtacagatcaagaaaaaaaggaagaataaaattcctatatcat

SEQ ID NO: 201 - DNA, 2932 bp, Homo sapiens
  Homo sapiens wingless-type MMTV integration site family, member 3A (WNT3A)
agctcccagggcccggccccccccggcgctcacgctctcggggcggactcccggccctccgcgccctctcgcgcggcgatggccccactcggatacttcttactcctctgcagcctgaagcaggctctgggcagctacccgatctggtggtcgctggctgttgggccacagtattcctccctgggctcgcagcccatcctgtgtgccagcatcccgggcctggtccccaagcagctccgcttctgcaggaactacgtggagatcatgcccagcgtggccgagggcatcaagattggcatccaggagtgccagcaccagttccgcggccgccggtggaactgcaccaccgtccacgacagcctggccatcttcgggcccgtgctggacaaagctaccagggagtcggcctttgtccacgccattgcctcagccggtgtggcctttgcagtgacacgctcatgtgcagaaggcacggccgccatctgtggctgcagcagccgccaccagggctcaccaggcaagggctggaagtggggtggctgtagcgaggacatcgagtttggtgggatggtgtctcgggagttcgccgacgcccgggagaaccggccagatgcccgctcagccatgaaccgccacaacaacgaggctgggcgccaggccatcgccagccacatgcacctcaagtgcaagtgccacgggctgtcgggcagctgcgaggtgaagacatgctggtggtcgcaacccgacttccgcgccatcggtgacttcctcaaggacaagtacgacagcgcctcggagatggtggtggagaagcaccgggagtcccgcggctgggtggagaccctgcggccgcgctacacctacttcaaggtgcccacggagcgcgacctggtctactacgaggcctcgcccaacttctgcgagcccaaccctgagacgggctccttcggcacgcgcgaccgcacctgcaacgtcagctcgcacggcatcgacggctgcgacctgctgtgctgcggccgcggccacaacgcgcgagcggagcggcgccgggagaagtgccgctgcgtgttccactggtgctgctacgtcagctgccaggagtgcacgcgcgtctacgacgtgcacacctgcaagtaggcaccggccgcggctccccctggacggggcgggccctgcctgagggtgggcttttccctgggtggagcaggactcccacctaaacggggcagtactcctccctgggggcgggactcctccctgggggtggggctcctacctgggggcagaactcctacctgaaggcagggctcctccctggagctagtgtctcctctctggtggctgggctgctcctgaatgaggcggagctccaggatggggaggggctctgcgttggcttctccctggggacggggctcccctggacagaggcggggctacagattgggcggggcttctcttgggtgggacagggcttctcctgcgggggcgaggcccctcccagtaagggcgtggctctgggtgggcggggcactaggtaggcttctacctgcaggcggggctcctcctgaaggaggcggggctctaggatggggcacggctctggggtaggctgctccctgagggcggagcgcctccttaggagtggggttttatggtggatgaggcttcttcctggatggggcagagcttctcctgaccagggcaaggccccttccacgggggctgtggctctgggtgggcgtggcctgcataggctccttcctgtgggtggggcttctctgggaccaggctccaatggggcggggcttctctccgcgggtgggactcttccctgggaaccgccctcctgattaaggcgtggcttctgcaggaatcccggctccagagcaggaaattcagcccaccagccacctcatccccaaccccctgtaaggttccatccacccctgcgtcgagctgggaaggttccatgaagcgagtcgggtccccaacccgtgcccctgggatccgagggcccctctccaagcgcctggctttggaatgctccaggcgcgccgacgcctgtgccaccccttcctcagcctggggtttgaccacccacctgaccaggggccctacctggggaaagcctgaagggcctcccagcccccaaccccaagaccaagcttagtcctgggagaggacagggacttcgcagaggcaagcgaccgaggccctcccaaagaggcccgccctgcccgggctcccacaccgtcaggtactcctgccagggaactggcctgctgcgccccaggccccgcccgtctctgctctgctcagctgcgcccccttctttgcagctgcccagcccctcctccctgccctcgggtctccccacctgcactccatccagctacaggagagatagaagcctctcgtcccgtccctccctttcctccgcctgtccacagccccttaagggaaaggtaggaagagaggtccagccccccaggctgcccagagctgctggtctcatttgggggcgttcgggaggtttggggggcatcaaccccccgactgtgctgctcgcgaaggtcccacagccctgagatgggccggcccccttcctggcccctcatggcgggactggagaaatggtccgctttcctggagccaatggcccggcccctcctgactcatccgcctggcccgggaatgaatggggaggccgctgaacccacccggcccatatccctggttgcctcatggccagcgcccctcagcctctgccactgtgaaccggctcccaccctcaaggtgcggggagaagaagcggccaggcggggcgccccaagagcccaaaagagggcacaccgccatcctctgcctcaaattctgcgtttttggttttaatgttatatctgatgctgctatatccactgtccaacgg

SEQ ID NO: 202 - DNA, 2368 bp, Homo sapiens
  Homo sapiens wingless-type MMTV integration site family, member 1 (WNT1), mRNA.
gcggtgccgcccgccgtggccgcctcagcccaccagccgggaccgcgagccatgctgtccgccgcccgcccccagggttgttaaagccagactgcgaactctcgccactgccgccaccgccgcgtcccgtcccaccgtcgcgggcaacaaccaaagtcgccgcaactgcagcacagagcgggcaaagccaggcaggccatggggctctgggcgctgttgcctggctgggtttctgctacgctgctgctggcgctggccgctctgcccgcagccctggctgccaacagcagtggccgatggtggggtattgtgaacgtagcctcctccacgaacctgcttacagactccaagagtctgcaactggtactcgagcccagtctgcagctgttgagccgcaaacagcggcgtctgatacgccaaaatccggggatcctgcacagcgtgagtggggggctgcagagtgccgtgcgcgagtgcaagtggcagttccggaatcgccgctggaactgtcccactgctccagggccccacctcttcggcaagatcgtcaaccgaggctgtcgagaaacggcgtttatcttcgctatcacctccgccggggtcacccattcggtggcgcgctcctgctcagaaggttccatcgaatcctgcacgtgtgactaccggcggcgcggccccgggggccccgactggcactgggggggctgcagcgacaacattgacttcggccgcctcttcggccgggagttcgtggactccggggagaaggggcgggacctgcgcttcctcatgaaccttcacaacaacgaggcaggccgtacgaccgtattctccgagatgcgccaggagtgcaagtgccacgggatgtccggctcatgcacggtgcgcacgtgctggatgcggctgcccacgctgcgcgccgtgggcgatgtgctgcgcgaccgcttcgacggcgcctcgcgcgtcctgtacggcaaccgcggcagcaaccgcgcttcgcgagcggagctgctgcgcctggagccggaagacccggcccacaaaccgccctccccccacgacctcgtctacttcgagaaatcgcccaacttctgcacgtacagcggacgcctgggcacagcaggcacggcagggcgcgcctgtaacagctcgtcgcccgcgctggacggctgcgagctgctctgctgcggcaggggccaccgcacgcgcacgcagcgcgtcaccgagcgctgcaactgcaccttccactggtgctgccacgtcagctgccgcaactgcacgcacacgcgcgtactgcacgagtgtctgtgaggcgctgcgcggactcgcccccaggaaacgctctcctcgagccctcccccaaacagactcgctagcactcaagacccggttattcgcccacccgagtacctccagtcacactccccgcggttcatacgcatcccatctctcccacttcctcctacctggggactcctcaaaccacttgcctggggcggcatgaaccctcttgccatcctgatggacctgccccggacctacctccctccctctccgcgggagaccccttgttgcactgccccctgcttggccaggaggtgagagaaggatgggtcccctccgccatggggtcggctcctgatggtgtcattctgcctgctccatcgcgccagcgacctctctgcctctcttcttcccctttgtcctgcgttttctccgggtcctcctaagtcccttcctattctcctgccatgggtgcagaccctgaacccacacctgggcatcagggcctttctcctccccacctgtagctgaagcaggaggttacagggcaaaagggcagctgtgatgatgtggaaatgaggttgggggaaccagcagaaatgcccccattctcccagtctctgtcgtggagccattgaacagctgtgagccatgcctccctgggccacctcctaccccttcctgtcctgcctcctcatcagtgtgtaaataatttgcactgaaacgtggatacagagccacgagtttggatgttgtaaataaaactatttattgtgctgggtcccagcctggtttgcaaagaccacctccaacccaacccaatccctctccactcttctctcctttctccctgcagccttttctggtccctcttctctcctcagtttctcaaagatgcgtttgcctcctggaatcagtatttccttccactgtagctattagcggctcctcgcccccaccagtgtagcatcttcctctgcagaataaaatctctatttttatcgatgacttggtggcttttccttgaatccagaacacaaccttgtttgtggtgtcccctatcctccccttttaccactcccag

SEQ ID NO: 203 - DNA, 4469 bp, Homo sapiens
  Homo sapiens secreted frizzled-related protein 1 (SFRP1), mRNA.
cctgcagcctccggagtcagtgccgcgcgcccgccgccccgcgccttcctgctcgccgcacctccgggagccggggcgcacccagcccgcagcgccgcctccccgcccgcgccgcctccgaccgcaggccgagggccgccactggccggggggaccgggcagcagcttgcggccgcggagccgggcaacgctggggactgcgccttttgtccccggaggtccctggaagtttgcggcaggacgcgcgcggggaggcggcggaggcagccccgacgtcgcggagaacagggcgcagagccggcatgggcatcgggcgcagcgaggggggccgccgcggggccctgggcgtgctgctggcgctgggcgcggcgcttctggccgtgggctcggccagcgagtacgactacgtgagcttccagtcggacatcggcccgtaccagagcgggcgcttctacaccaagccacctcagtgcgtggacatccccgcggacctgcggctgtgccacaacgtgggctacaagaagatggtgctgcccaacctgctggagcacgagaccatggcggaggtgaagcagcaggccagcagctgggtgcccctgctcaacaagaactgccacgccgggacccaggtcttcctctgctcgctcttcgcgcccgtctgcctggaccggcccatctacccgtgtcgctggctctgcgaggccgtgcgcgactcgtgcgagccggtcatgcagttcttcggcttctactggcccgagatgcttaagtgtgacaagttcccggagggggacgtctgcatcgccatgacgccgcccaatgccaccgaagcctccaagccccaaggcacaacggtgtgtcctccctgtgacaacgagttgaaatctgaggccatcattgaacatctctgtgccagcgagtttgcactgaggatgaaaataaaagaagtgaaaaaagaaaatggcgacaagaagattgtccccaagaagaagaagcccctgaagttggggcccatcaagaagaaggacctgaagaagcttgtgctgtacctgaagaatggggctgactgtccctgccaccagctggacaacctcagccaccacttcctcatcatgggccgcaaggtgaagagccagtacttgctgacggccatccacaagtgggacaagaaaaacaaggagttcaaaaacttcatgaagaaaatgaaaaaccatgagtgccccacctttcagtccgtgtttaagtgattctcccgggggcagggtggggagggagcctcgggtggggtgggagcgggggggacagtgcccgggaacccgtggtcacacacacgcactgccctgtcagtagtggacattgtaatccagtcggcttgttcttgcagcattcccgctccctttccctccatagccacgctccaaaccccagggtagccatggccgggtaaagcaagggccatttagattaggaaggtttttaagatccgcaatgtggagcagcagccactgcacaggaggaggtgacaaaccatttccaacagcaacacagccactaaaacacaaaaagggggattgggcggaaagtgagagccagcagcaaaaactacattttgcaacttgttggtgtggatctattggctgatctatgcctttcaactagaaaattctaatgattggcaagtcacgttgttttcaggtccagagtagtttctttctgtctgctttaaatggaaacagactcataccacacttacaattaaggtcaagcccagaaagtgataagtgcagggaggaaaagtgcaagtccattatctaatagtgacagcaaagggaccaggggagaggcattgccttctctgcccacagtctttccgtgtgattgtctttgaatctgaatcagccagtctcagatgccccaaagtttcggttcctatgagcccggggcatgatctgatccccaagacatgtggaggggcagcctgtgcctgcctttgtgtcagaaaaaggaaaccacagtgagcctgagagagacggcgattttcgggctgagaaggcagtagttttcaaaacacatagttaaaaaagaaacaaatgaaaaaaattttagaacagtccagcaaattgctagtcagggtgaattgtgaaattgggtgaagagcttaggattctaatctcatgttttttccttttcacatttttaaaagaacaatgacaaacacccacttatttttcaaggttttaaaacagtctacattgagcatttgaaaggtgtgctagaacaaggtctcctgatccgtccgaggctgcttcccagaggagcagctctccccaggcatttgccaagggaggcggatttccctggtagtgtagctgtgtggctttccttcctgaagagtccgtggttgccctagaacctaacaccccctagcaaaactcacagagctttccgtttttttctttcctgtaaagaaacatttcctttgaacttgattgcctatggatcaaagaaattcagaacagcctgcctgttcccccgcactttttacatatatttgtttcatttctgcagatggaaagttgacatgggtggggtgtccccatccagcgagagagtttcaaaagcaaaacatctctgcagtttttcccaagtaccctgagatacttcccaaagcccttatgtttaatcagcgatgtatataagccagttcacttagacaactttacccttcttgtccaatgtacaggaagtagttctaaaaaaaatgcatattaatttcttcccccaaagccggattcttaattctctgcaacactttgaggacatttatgattgtccctctgggccaatgcttatacccagtgaggatgctgcagtgaggctgtaaagtggccccctgcggccctagcctgacccggagaaaggatggtagattctgttaactcttgaagactccagtatgaaaatcagcatgcccgcctagttacctaccggagagttatcctgataaattaacctctcacagttagtgatcctgtccttttaacaccttttttgtggggttctctctgacctttcatcgtaaagtgctggggaccttaagtgatttgcctgtaattttggatgattaaaaaatgtgtatatatattagctaattagaaatattctacttctctgttgtcaaactgaaattcagagcaagttcctgagtgcgtggatctgggtcttagttctggttgattcactcaagagttcagtgctcatacgtatctgctcattttgacaaagtgcctcatgcaaccgggccctctctctgcggcagagtccttagtggaggggtttacctggaacataagtagttaccacagaatacggaagagcaggtgactgtgctgtgcagctctctaaatgggaattctcaggtaggaagcaacagcttcagaaagagctcaaaataaattggaaatgtgaatcgcagctgtgggttttaccaccgtctgtctcagagtcccaggaccttgagtgtcattagttactttattgaaggttttagacccatagcagctttgtctctgtcacatcagcaatttcagaaccaaaagggaggctctctgtaggcacagagctgcactatcacgagcctttgtttttctccacaaagtatctaacaaaaccaatgtgcagactgattggcctggtcattggtctccgagagaggaggtttgcctgtgatttgcctgtgatttcctaattatcgctagggccaaggtgggatttgtaaagctttacaataatcattctggatagagtcctgggaggtccttggcagaactcagttaaatctttgaagaatatttgtagttatcttagaagatagcatgggaggtgaggattccaaaaacattttatttttaaaatatcctgtgtaacacttggctcttggtacctgtgggttagcatcaagttctccccagggtagaattcaatcagagctccagtttgcatttggatgtgtaaattacagtaatcccatttcccaaacctaaaatctgtttttctcatcagactctgagtaactggttgctgtgtcataacttcatagatgcaggaggctcaggtgatctgtttgaggagagcaccctaggcagcctgcagggaataacatactggccgttctgacctgttgccagcagatacacaggacatggatgaaattcccgtttcctctagtttcttcctgtagtactcctcttttagatcctaagtctcttacaaaagctttgaatactgtgaaaatgttttacattccatttcatttgtgttgtttttttaactgcattttaccagatgttttgatgttatcgcttatgttaatagtaattcccgtacgtgttcattttattttcatgctttttcagccatgtatcaatattcacttgactaaaatcactcaattaatcaatgaaaaaaaaaaa

SEQ ID NO: 204 - DNA, 2820 bp, Homo sapiens
  Homo sapiens secreted frizzled-related protein 4 (SFRP4), mRNA
ggcgggttcgcgccccgaaggctgagagctggcgctgctcgtgccctgtgtgccagacggcggagctccgcggccggaccccgcggccccgctttgctgccgactggagtttgggggaagaaactctcctgcgccccagaagatttcttcctcggcgaagggacagcgaaagatgagggtggcaggaagagaaggcgctttctgtctgccggggtcgcagcgcgagagggcagtgccatgttcctctccatcctagtggcgctgtgcctgtggctgcacctggcgctgggcgtgcgcggcgcgccctgcgaggcggtgcgcatccctatgtgccggcacatgccctggaacatcacgcggatgcccaaccacctgcaccacagcacgcaggagaacgccatcctggccatcgagcagtacgaggagctggtggacgtgaactgcagcgccgtgctgcgcttcttcttctgtgccatgtacgcgcccatttgcaccctggagttcctgcacgaccctatcaagccgtgcaagtcggtgtgccaacgcgcgcgcgacgactgcgagcccctcatgaagatgtacaaccacagctggcccgaaagcctggcctgcgacgagctgcctgtctatgaccgtggcgtgtgcatttcgcctgaagccatcgtcacggacctcccggaggatgttaagtggatagacatcacaccagacatgatggtacaggaaaggcctcttgatgttgactgtaaacgcctaagccccgatcggtgcaagtgtaaaaaggtgaagccaactttggcaacgtatctcagcaaaaactacagctatgttattcatgccaaaataaaagctgtgcagaggagtggctgcaatgaggtcacaacggtggtggatgtaaaagagatcttcaagtcctcatcacccatccctcgaactcaagtcccgctcattacaaattcttcttgccagtgtccacacatcctgccccatcaagatgttctcatcatgtgttacgagtggcgttcaaggatgatgcttcttgaaaattgcttagttgaaaaatggagagatcagcttagtaaaagatccatacagtgggaagagaggctgcaggaacagcggagaacagttcaggacaagaagaaaacagccgggcgcaccagtcgtagtaatccccccaaaccaaagggaaagcctcctgctcccaaaccagccagtcccaagaagaacattaaaactaggagtgcccagaagagaacaaacccgaaaagagtgtgagctaactagtttccaaagcggagacttccgacttccttacaggatgaggctgggcattgcctgggacagcctatgtaaggccatgtgccccttgccctaacaactcactgcagtgctcttcatagacacatcttgcagcatttttcttaaggctatgcttcagtttttctttgtaagccatcacaagccatagtggtaggtttgccctttggtacagaaggtgagttaaagctggtggaaaaggcttattgcattgcattcagagtaacctgtgtgcatactctagaagagtagggaaaataatgcttgttacaattcgacctaatatgtgcattgtaaaataaatgccatatttcaaacaaaacacgtaatttttttacagtatgttttattaccttttgatatctgttgttgcaatgttagtgatgttttaaaatgtgatgaaaatataatgtttttaagaaggaacagtagtggaatgaatgttaaaagatctttatgtgtttatggtctgcagaaggatttttgtgatgaaaggggattttttgaaaaattagagaagtagcatatggaaaattataatgtgtttttttaccaatgacttcagtttctgtttttagctagaaacttaaaaacaaaaataataataaagaaaaataaataaaaaggagaggcagacaatgtctggattcctgttttttggttacctgatttccatgatcatgatgcttcttgtcaacaccctcttaagcagcaccagaaacagtgagtttgtctgtaccattaggagttaggtactaattagttggctaatgctcaagtattttatacccacaagagaggtatgtcactcatcttacttcccaggacatccaccctgagaataatttgacaagcttaaaaatggccttcatgtgagtgccaaattttgtttttcttcatttaaatattttctttgcctaaatacatgtgagaggagttaaatataaatgtacagagaggaaagttgagttccacctctgaaatgagaattacttgacagttgggatactttaatcagaaaaaaagaacttatttgcagcattttatcaacaaatttcataattgtggacaattggaggcatttattttaaaaaacaattttattggccttttgctaacacagtaagcatgtattttataaggcattcaataaatgcacaacgcccaaaggaaataaaatcctatctaatcctactctccactacacagaggtaatcactattagtattttggcatattattctccaggtgtttgcttatgcacttataaaatgatttgaacaaataaaactaggaacctgtatacatgtgtttcataacctgcctcctttgcttggccctttattgagataagttttcctgtcaagaaagcagaaaccatctcatttctaacagctgtgttatattccatagtatgcattactcaacaaactgttgtgctattggatacttaggtggtttcttcactgacaatactgaataaacatctcaccggaattc

SEQ ID NO: 205 - DNA, 4350 bp, Homo sapiens; identical to SEQ ID NO: 124
  Homo sapiens frizzled homolog 1 (Drosophila) (FZD1), mRNA.

SEQ ID NO: 206 - DNA, 1983 bp, Homo sapiens
  Homo sapiens frizzled homolog 2 (Drosophila) (FZD2), mRNA.
cgagtaaagtttgcaaagaggcgcgggaggcggcagccgcagcgaggaggcggcggggaagaagcgcagtctccgggttgggggcgggggcggggggggcgccaaggagccgggtggggggcggcggccagcatgcggccccgcagcgccctgccccgcctgctgctgccgctgctgctgctgcccgccgccgggccggcccagttccacggggagaagggcatctccatcccggaccacggcttctgccagcccatctccatcccgctgtgcacggacatcgcctacaaccagaccatcatgcccaaccttctgggccacacgaaccaggaggacgcaggcctagaggtgcaccagttctatccgctggtgaaggtgcagtgctcgcccgaactgcgcttcttcctgtgctccatgtacgcacccgtgtgcaccgtgctggaacaggccatcccgccgtgccgctctatctgtgagcgcgcgcgccagggctgcgaagccctcatgaacaagttcggttttcagtggcccgagcgcctgcgctgcgagcacttcccgcgccacggcgccgagcagatctgcgtcggccagaaccactccgaggacggagctcccgcgctactcaccaccgcgccgccgccgggactgcagccgggtgccgggggcaccccgggtggcccgggcggcggcggcgctcccccgcgctacgccacgctggagcaccccttccactgcccgcgcgtcctcaaggtgccatcctatctcagctacaagtttctgggcgagcgtgattgtgctgcgccctgcgaacctgcgcggcccgatggttccatgttcttctcacaggaggagacgcgtttcgcgcgcctctggatcctcacctggtcggtgctgtgctgcgcttccaccttcttcactgtcaccacgtacttggtagacatgcagcgcttccgctacccagagcggcctatcatttttctgtcgggctgctacaccatggtgtcggtggcctacatcgcgggcttcgtgctccaggagcgcgtggtgtgcaacgagcgcttctccgaggacggttaccgcacggtggtgcagggcaccaagaaggagggctgcaccatcctcttcatgatgctctacttcttcagcatggccagctccatctggtgggtcatcctgtcgctcacctggttcctggcagccggcatgaagtggggccacgaggccatcgaggccaactctcagtacttccacctggccgcctgggccgtgccggccgtcaagaccatcaccatcctggccatgggccagatcgacggcgacctgctgagcggcgtgtgcttcgtaggcctcaacagcctggacccgctgcggggcttcgtgctagcgccgctcttcgtgtacctgttcatcggcacgtccttcctcctggccggcttcgtgtcgctcttccgcatccgcaccatcatgaagcacgacggcaccaagaccgaaaagctggagcggctcatggtgcgcatcggcgtcttctccgtgctctacacagtgcccgccaccatcgtcatcgcttgctacttctacgagcaggccttccgcgagcactgggagcgctcgtgggtgagccagcactgcaagagcctggccatcccgtgcccggcgcactacacgccgcgcatgtcgcccgacttcacggtctacatgatcaaatacctcatgacgctcatcgtgggcatcacgtcgggcttctggatctggtcgggcaagacgctgcactcgtggaggaagttctacactcgcctcaccaacagccgacacggtgagaccaccgtgtgagggacgcccccaggccggaaccgcgcggcgctttcctccgcccggggtggggcccctacagactccgtattttatttttttaaataaaaaacgatcgaaaccatttcacttttaggttgctttttaaaagagaactctctgcccaacaccccc

SEQ ID NO: 207 - DNA, 3375 bp, Homo sapiens; identical to SEQ ID NO: 178
  Homo sapiens frizzled homolog 3 (Drosophila) (FZD3), mRNA.

SEQ ID NO: 208 - DNA, 7392 bp, Homo sapiens; identical to SEQ ID NO: 177
  Homo sapiens frizzled homolog 4 (Drosophila) (FZD4), mRNA.
  modified_base (7110): a, c, g, t, other or unknown

SEQ ID NO: 209 - DNA, 2779 bp, Homo sapiens
  Homo sapiens HMG-box transcription factor TCF-3 (TCF-3), mRNA.
gcgccgggccgggccgggcagggcgcgggcggctaggggctccgagagcggcggccccggcccgcggccccaccatgccccagctcggcggcgggggcggcggcggcggcggcggcagcgggggaggcggcggctccagcgccggggcggccggcggaggggacgacctcggggcgaacgacgagctgatccccttccaggacgaggggggcgaggagcaggagccgagcagcgatagcgcctcggcgcagcgggacctagacgaggtcaagtcgtccctggtcaacgagtcggagaaccagagcagcagctcggactcggaggcggagaggcgcccgcagcccgtccgggacactttccagaagccgcgggactatttcgccgaagtgagaaggcctcaggacagcgcgttctttaaaggacccccgtaccctgggtaccccttcctgatgatcccggacctgagcagcccgtacctctccaacggacccctgtctcccggaggagcgcgcacctacctgcagatgaaatggcccctcctcgatgtcccctccagcgccacagtcaaggacacgaggtcaccatctccagcacacttgtctaataaagttcctgtcgttcagcacccgcatcacatgcatccgctgactcccctcatcacctacagcaatgaccacttctcccccggctcccctcccacccacctctccccagagatcgatccaaagacaggaatcccccggccccctcacccatccgagctgtcaccgtattacccactctctcccggagctgtcggacaaatcccccaccccctcggctggctcgtcccacagcaaggccagcccatgtactcccttcctcccggtggcttccggcacccttaccccgccctcgccatgaacgcctcgatgtccagcctggtctccagtcggttctctcctcacatggtggctcctgcccaccctggcctgcccacctcagggatcccccaccctgccatcgtctcccccatcgtcaagcaggaaccggcaccccccagcctgagccctgcagtgagcgtgaaatcaccagtcaccgtgaaaaaggaggaggaaaagaagccccacgtgaagaagcctctgaatgccttcatgttgtatatgaaggagatgagggccaaggtggtggctgagtgcaccctgaaggaaagtgcagccattaaccagatccttggaagaaagtggcacaacctgtctcgagaagaacaggccaagtactacgagctggcccggaaggagcggcagcttcactcgcagctctacccaacctggtcagcccgggacaactatggtaagaaaaagaagaggaagagagaaaagcagctgtcccagacacagtcacagcagcaagtccaggaggcagagggtgccctggcctccaagagcaagaagccatgtgttcagtacctgccccccgagaagccctgtgacagccctgcctcctcccacgggagcatgctggactccccggccactccctctgcagctttggcctcaccagctgcccctgctgccacccattcggagcaagcccagcccctctccctcaccaccaaaccagaaacccgggcccagctggctctccactctgccgccttcctgtcggctaaggctgcagcctcctcctctgggcagatgggcagccagcctcccctcctgtcccggcccctcccccttgggtccatgcccacagctctgctggcctctcccccgtccttccccgccacgctccatgcccaccaggccctcccggtgctacaggcccagcctctttccctggtcaccaagtctgcccactaagctccccccgacccctgcaggctgtcacatgactcattgagtagtaatgattcagaagaaaaagaaaaaggagactttattggtcaatatttgaccactctggactgttctgtaaagtggctggtaacaacagcactttacagtttgtagatgtaaccagtagctgatcttaaggcttttttaaaaaacaaaacaaaacaacaaaaaaaaatctttataagaaagagaactgaaaagtagcgtgctattcgtcctgtaggtgctgtggtggatggacctgggcagagggcacttctctctcttacctctcttgcactttctgtctcctgtctcttctcgcccctgccgcctgccccagcttccccgactccatctgcagctctgccattgtgacatttcctgttacccagcccaagttttcatcgtctgctcaataccgtgggttcttcttcgtcctctgtcctctgcccagtgtgaggccatcaccatgtgagaagacatcttggcctgatttgctgccaccagcgtcccctccctcagtgggcccgaactcgccagccccagctttcagtggagaaagcggtcctctgaaatggtttcctcccaacccccgcatttaaagggactcaaggtgcctgccacttcctcagcgaagaagtctgtgttcctccccgtccttgccagtggcgatcatcccttcacaatcccagagtggcaggcgggaccagccccatggtctggctcctgtcacctgggtccgtgccagcacaatctgccaaagttctagagaccctgttcccttccccatcacctcacatgcttcttctgtgtgtatttctttttgtttttatggtttttggagcaatttaaactcccagttgtttattttcacaaaagaaaataaaattgcagttgcaagaaaaaaaaaaaaaaaaaaa

SEQ ID NO: 210 - DNA, 2500 bp, Homo sapiens
  Homo sapiens transcription factor 4 (TCF4), mRNA.
cggggggatcttggctgtgtgtctgcggatctgtagtggcggcggcggcggcggcggcggggaggcagcaggcgcgggagcgggcgcaggagcaggcggcggcggtggcggcggcggttagacatgaacgccgcctcggcgccggcggtgcacggagagccccttctcgcgcgcgggcggtttgtgtgattttgctaaaatgcatcaccaacagcgaatggctgccttagggacggacaaagagctgagtgatttactggatttcagtgcgatgttttcacctcctgtgagcagtgggaaaaatggaccaacttctttggcaagtggacattttactggctcaaatgtagaagacagaagtagctcagggtcctgggggaatggaggacatccaagcccgtccaggaactatggagatgggactccctatgaccacatgaccagcagggaccttgggtcacatgacaatctctctccaccttttgtcaattccagaatacaaagtaaaacagaaaggggctcatactcatcttatgggagagaatcaaacttacagggttgccaccagcagagtctccttggaggtgacatggatatgggcaacccaggaaccctttcgcccaccaaacctggttcccagtactatcagtattctagcaataatccccgaaggaggcctcttcacagtagtgccatggaggtacagacaaagaaagttcgaaaagttcctccaggtttgccatcttcagtctatgctccatcagcaagcactgccgactacaatagggactcgccaggctatccttcctccaaaccagcaaccagcactttccctagctccttcttcatgcaagatggccatcacagcagtgacccttggagctcctccagtgggatgaatcagcctggctatgcaggaatgttgggcaactcttctcatattccacagtccagcagctactgtagcctgcatccacatgaacgtttgagctatccatcacactcctcagcagacatcaattccagtcttcctccgatgtccactttccatcgtagtggtacaaaccattacagcacctcttcctgtacgcctcctgccaacgggacagacagtataatggcaaatagaggaagcggggcagccggcagctcccagactggagatgctctggggaaagcacttgcttcgatctattctccagatcacactaacaacagcttttcatcaaacccttcaactcctgttggctctcctccatctctctcagcaggcacagctgtttggtctagaaatggaggacaggcctcatcgtctcctaattatgaaggacccttacactctttgcaaagccgaattgaagatcgtttagaaagactggatgatgctattcatgttctccggaaccatgcagtgggcccatccacagctatgcctggtggtcatggggacatgcatggaatcattggaccttctcataatggagccatgggtggtctgggctcagggtatggaaccggccttctttcagccaacagacattcactcatggtggggacccatcgtgaagatggcgtggccctgagaggcagccattctcttctgccaaaccaggttccggttccacagcttcctgtccagtctgcgacttcccctgacctgaacccaccccaggacccttacagaggcatgccaccaggactacaggggcagagtgtctcctctggcagctctgagatcaaatccgatgacgagggtgatgagaacctgcaagacacgaaatcttcggaggacaagaaattagatgacgacaagaaggatatcaaatcaattactagcaataatgacgatgaggacctgacaccagagcagaaggcagagcgtgagaaggagcggaggatggccaacaatgcccgagagcgtctgcgggtccgtgacatcaacgaggctttcaaagagctcggccgcatggtgcagctccacctcaagagtgacaagccccagaccaagctcctgatcctccaccaggcggtggccgtcatcctcagtctggagcagcaagtccgagaaaggaatctgaatccgaaagctgcgtgtctgaaaagaagggaggaagagaaggtgtcctcggagcctccccctctctccttggccggcccacaccctggaatgggagacgcatcgaatcacatgggacagatgtaaaagggtccaagttgccacattgcttcattaaaacaagagaccacttccttaacagctgtattatcttaaacccacataaacacttctccttaacccccatttttgtaatataagacaagtctgagtagttatgaatcgcagacgcaagaggtttcagcattcccaattatcaaaaaacagaaaaacaaaaaaaagaaagaaaaaagtgcaacttgagggacgactttctttaacatatcattcagaatgtgcaaagcagtatgtacaggctgagacacagcccagagactgaacggc

SEQ ID NO: 211 - DNA, 4523 bp, Homo sapiens
  Homo sapiens EphA7 (EPHA7), mRNA
cggtgcgagcgaacaggagtgggggggaaattaaaaaaagctaaacgtggagcagccgatcggggaccgagaaggggaatcgatgcaaggagcacactaaaacaaaagctacttcggaacaaacagcatttaaaaatccacgactcaagataactgaaacctaaaataaaacctgctcatgcaccatggtttttcaaactcggtacccttcatggattattttatgctacatctggctgctccgctttgcacacacaggggaggcgcaggctgcgaaggaagtactactgctggattctaaagcacaacaaacagagttggagtggatttcctctccacccaatgggtgggaagaaattagtggtttggatgagaactataccccgatacgaacataccaggtgtgccaagtcatggagcccaaccaaaacaactggctgcggactaactggatttccaaaggcaatgcacaaaggatttttgtagaattgaaattcaccctgagggattgtaacagtcttcctggagtactgggaacttgcaaggaaacatttaatttgtactattatgaaacagactatgacactggcaggaatataagagaaaacctctatgtaaaaatagacaccattgctgcagatgaaagttttacccaaggtgaccttggtgaaagaaagatgaagcttaacactgaggtgagagagattggacctttgtccaaaaagggattctatcttgcctttcaggatgtaggggcttgcatagctttggtttctgtcaaagtgtactacaagaagtgctggtccattattgagaacttagctatctttccagatacagtgactggttcagaattttcctctttagtcgaggttcgagggacatgtgtcagcagtgcagaggaagaagcggaaaacgcccccaggatgcactgcagtgcagaaggagaatggttagtgcccattggaaaatgtatctgcaaagcaggctaccagcaaaaaggagacacttgtgaaccctgtggccgtgggttctacaagtcttcctctcaagatcttcagtgctctcgttgtccaactcacagtttttctgataaagaaggctcctccagatgtgaatgtgaagatgggtattacagggctccatctgacccaccatacgttgcatgcacaaggcctccatctgcaccacagaacctcattttcaacatcaaccaaaccacagtaagtttggaatggagtcctcctgcagacaatgggggaagaaacgatgtgacctacagaatattgtgtaagcggtgcagttgggagcagggcgaatgtgttccctgtgggagtaacattggatacatgccccagcagactggattagaggataactatgtcactgtcatggacctgctagcccacgctaattatacttttgaagttgaagctgtaaatggagtttctgacttaagccgatcccagaggctctttgctgctgtcagtatcaccactggtcaagcagctccctcgcaagtgagcggagtaatgaaggagagagtactgcagcggagtgtcgagctttcctggcaggaaccagagcatcccaatggagtcatcacagaatatgaaatcaagtattacgagaaagatcaaagggaacggacctactcaacagtaaaaaccaagtctacttcagcctccattaataatctgaaaccaggaacagtgtatgttttccagattcgggcttttactgctgctggttatggaaattacagtcccagacttgatgttgctacactagaggaagctacaggtaaaatgtttgaagctacagctgtctccagtgaacagaatcctgttattatcattgctgtggttgctgtagctgggaccatcattttggtgttcatggtctttggcttcatcattgggagaaggcactgtggttatagcaaagctgaccaagaaggcgatgaagagctttactttcattttaaatttccaggcaccaaaacctacattgaccctgaaacctatgaggacccaaatagagctgtccatcaattcgccaaggagctagatgcctcctgtattaaaattgagcgtgtgattggtgcaggagaattcggtgaagtctgcagtggccgtttgaaacttccagggaaaagagatgttgcagtagccataaaaaccctgaaagttggttacacagaaaaacaaaggagagactttttgtgtgaagcaagcatcatggggcagtttgaccacccaaatgttgtccatttggaaggggttgttacaagagggaaaccagtcatgatagtaatagagttcatggaaaatggagccctagatgcatttctcaggaaacatgatgggcaatttacagtcattcagttagtaggaatgctgagaggaattgctgctggaatgagatatttggctgatatgggatatgttcacagggaccttgcagctcgcaatattcttgtcaacagcaatctcgtttgtaaagtgtcagattttggcctgtcccgagttatagaggatgatccagaagctgtctatacaactactggtggaaaaattccagtaaggtggacagcacccgaagccatccagtaccggaaattcacatcagccagtgatgtatggagctatggaatagtcatgtgggaagttatgtcttatggagaaagaccttattgggacatgtcaaatcaagatgttataaaagcaatagaagaaggttatcgtttaccagcacccatggactgcccagctggccttcaccagctaatgttggattgttggcaaaaggagcgtgctgaaaggccaaaatttgaacagatagttggaattctagacaaaatgattcgaaacccaaatagtctgaaaactcccctgggaacttgtagtaggccaataagccctcttctggatcaaaacactcctgatttcactaccttttgttcagttggagaatggctacaagctattaagatggaaagatataaagataatttcacggcagctggctacaattcccttgaatcagtagccaggatgactattgaggatgtgatgagtttagggatcacactggttggtcatcaaaagaaaatcatgagcagcattcagactatgagagcacaaatgctacatttacatggaactggcattcaagtgtgatatgcatttctcccttttaagggagattacagactgcaagagaacagtactggccttcagtatatgcatagaatgctgctagaagacaagtgatgtcctgggtccttccaacagtgaagagaagatttaagaagcacctatagacttgaactcctaagtgccaccagaatatataaaaagggaatttaggatccaccatcggtggccaggaaaatagcagtgacaataaacaaagtactacctgaaaaacatccaaacaccttgagctctctaacctcctttttgtcttatagactttttaaaatgtacataaagaatttaagaaagaatatatttgtcaaataaaatcatgatcttattgttaaaattaatgaaatattttccttaaatatgtgatttcagactattcctttttaaaatcatttgtgtttattcttcataaggactttgttttagaaagctgtttatagctttggacctttttagtgttaaatctgtaacattactacactgggtacctttgaaagaatctcaaatttcaaaagaaatagcatgattgaagatacatctctgttagaacattggtatcctttttgtgccattttattctgtttaatcagtgctgttttgatattgtttgctaattggcaggtagtcaagaaaatgcaagttgccaagagctctgatattttttaaaaagaatttttttgtaaagatcagacaacacactatcttttcaatgaaaaaagcaataatgatccatacatactataaggcacttttaacagattgtttatagagtgattttactagaaagaatttaataaactcgaagtttaggtttatgagtatataaacaaatgaggcacttcatctgaagaatgttggtgaaggcaagtctctgaaagcagaactatccagtgttatctaaaaattaatctgagcacatcaagattttttcattctcgtgacattaggaaatttaggataaatagttgacatatattttatatcctcttctgttgaatgcagtccaaacatgaaaggaaataattgttttatattataactctgaagcatgataaaggggcagttcacaattttcaccatttaaacacaaatttgctgcacagaatatcaccattgcagttcaaaacaaaacaaaacaaaaagtcttttgtttgtgaacactgatgcaagaaacttgttaaatgaaaggactctttaccctagaaggaagaggtgaaggatctggcttgtttttaaagctttatttattaaaccatattatttgattactgtgttagaatttcataagcaataattaaatgtgtctttatg

SEQ ID NO: 212 - DNA, 4983 bp, Homo sapiens
  Homo sapiens EphA8 (EPHA8), mRNA
cgcccggccgggtgtgcggagagcgagggagcgcgctccctcccgacgcgcgggccgcagcggccaagcccgagggtgcgtggcgcccccgcccgcccggcccggcccggccatggcccccgcccggggccgcctgccccctgcgctctgggtcgtcacggccgcggcggcggcggccacctgcgtgtccgcggcgcgcggcgaagtgaatttgctggacacgtcgaccatccacggggactggggctggctcacgtatccggctcatgggtgggactccatcaacgaggtggacgagtccttccagcccatccacacgtaccaggtttgcaacgtcatgagccccaaccagaacaactggctgcgcacgagctgggtcccccgagacggcgcccggcgcgtctatgctgagatcaagtttaccctgcgcgactgcaacagcatgcctggtgtgctgggcacctgcaaggagaccttcaacctctactacctggagtcggaccgcgacctgggggccagcacacaagaaagccagttcctcaaaatcgacaccattgcggccgacgagagcttcacaggtgccgaccttggtgtgcggcgtctcaagctcaacacggaggtgcgcagtgtgggtcccctcagcaagcgcggcttctacctggccttccaggacataggtgcctgcctggccatcctctctctccgcatctactataagaagtgccctgccatggtgcgcaatctggctgccttctcggaggcagtgacgggggccgactcgtcctcactggtggaggtgaggggccagtgcgtgcggcactcagaggagcgggacacacccaagatgtactgcagcgcggagggcgagtggctcgtgcccatcggcaaatgcgtgtgcagtgccggctacgaggagcggcgggatgcctgtgtggcctgtgagctgggcttctacaagtcagcccctggggaccagctgtgtgcccgctgccctccccacagccactccgcagctccagccgcccaagcctgccactgtgacctcagctactaccgtgcagccctggacccgccgtcctcagcctgcacccggccaccctcggcaccagtgaacctgatctccagtgtgaatgggacatcagtgactctggagtgggcccctcccctggacccaggtggccgcagtgacatcacctacaatgccgtgtgccgccgctgcccctgggcactgagccgctgcgaggcatgtgggagcggcacccgctttgtgccccagcagacaagcctggtgcaggccagcctgctggtggccaacctgctggcccacatgaactactccttctggatcgaggccgtcaatggcgtgtccgacctgagccccgagccccgccgggccgctgtggtcaacatcaccacgaaccaggcagccccgtcccaggtggtggtgatccgtcaagagcgggcggggcagaccagcgtctcgctgctgtggcaggagcccgagcagccgaacggcatcatcctggagtatgagatcaagtactacgagaaggacaaggagatgcagagctactccaccctcaaggccgtcaccaccagagccaccgtctccggcctcaagccgggcacccgctacgtgttccaggtccgagcccgcacctcagcaggctgtggccgcttcagccaggccatggaggtggagaccgggaaaccccggccccgctatgacaccaggaccattgtctggatctgcctgacgctcatcacgggcctggtggtgcttctgctcctgctcatctgcaagaagaggcactgtggctacagcaaggccttccaggactcggacgaggagaagatgcactatcagaatggacaggcacccccacctgtcttcctgcctctgcatcaccccccgggaaagctcccagagccccagttctatgcggaaccccacacctacgaggagccaggccgggcgggccgcagtttcactcgggagatcgaggcctctaggatccacatcgagaaaatcatcggctctggagactccggggaagtctgctacgggaggctgcgggtgccagggcagcgggatgtgcccgtggccatcaaggccctcaaagccggctacacggagagacagaggcgggacttcctgagcgaggcgtccatcatggggcaattcgaccatcccaacatcatccgcctcgagggtgtcgtcacccgtggccgcctggcaatgattgtgactgagtacatggagaacggctctctggacaccttcctgaggacccacgacgggcagttcaccatcatgcagctggtgggcatgctgagaggagtgggtgccggcatgcgctacctctcagacctgggctatgtccaccgagacctggccgcccgcaacgtcctggttgacagcaacctggtctgcaaggtgtctgacttcgggctctcacgggtgctggaggacgacccggatgctgcctacaccaccacgggcgggaagatccccatccgctggacggccccagaggccatcgccttccgcaccttctcctcggccagcgacgtgtggagcttcggcgtggtcatgtgggaggtgctggcctatggggagcggccctactggaacatgaccaaccgggatgtcatcagctctgtggaggaggggtaccgcctgcccgcacccatgggctgcccccacgccctgcaccagctcatgctcgactgttggcacaaggaccgggcgcagcggcctcgcttctcccagattgtcagtgtcctcgatgcgctcatccgcagccctgagagtctcagggccaccgccacagtcagcaggtgcccaccccctgccttcgtccggagctgctttgacctccgagggggcagcggtggcggtgggggcctcaccgtgggggactggctggactccatccgcatgggccggtaccgagaccacttcgctgcgggcggatactcctctctgggcatggtgctacgcatgaacgcccaggacgtgcgcgccctgggcatcaccctcatgggccaccagaagaagatcctgggcagcattcagaccatgcgggcccagctgaccagcacccaggggccccgccggcacctctgatgtacagccagcagggcccaggcagccaccaagcccaccccaggtcatgccagcggcagaggacgtgaggggctggcagcaggcagggcggccccaggcctctgccctcctctcaggtgctggaggagctgaaggcttcgccacaggacctggagttatcaggggtcaggcgcctgggaaggggcctttggtggccaccctggtgaggacacctgtcccccagggcaggcaccttctcttttccagagcctggggcctccacgtcacagagtccaacagggacatcactcgcctgcctctgtgtgcgtgcatgtgtgtgtgtggtggggggtgttctcacaaggtcatgggatctcatgtgaacagtgtgtgatcaagtgtgtccaccccttcgggtctcagcatggacgtgtgcatgttatgagcgtgtgcttatccgttaaggctggaggcacatgtgggtgatggtggatgatgtgtcatgaatgaggaggtgtgtgagcagggaactcagtgtgacaccgccaggtccagcacccatgggggcgggggagaggctcacccctacgtccccccacacctggaggctggagccaggggccacttctgaactgcaccagcaccaggcccaccctcgtctctgcctgggtgagcccaccccggctgtatctcaggtctgggtcctccctctagccgaggaggccacctgcagcctccacccggctctcaccgctgcttcaacaggaaaacagggttcccggtcagtccggctggccgccttcatggaggcatcatggcagagcacatgagatgtcctcagctgggcttggctgcctggccagggccgggggctcagcagcctcctctagcctctgatgccttccctccacggcccaggtctcctcactcaaagtcccttcgccaacctttcaatgcccagccctgacacctgccctttgtcccccaggcctaggatcagggaccagaggatcctatcttctcagcacccagcccaccccttcctgtagcatatggggagactaaggcctggagagaggggtgatgccccgtcccaggttgcactgcaaccaagtgtcagagtcggggctccggcctcctgccaaggctcttgtccccatacaccatcccacaagggcgctgggggtggaagtgccctggaagcccctcccctctcacactgacctccccccttacggcccaccagggtatgtaaatatctcttttctaccatgtcagaatattttttcctcactcctgacaatgcaaaaatggtcttcaaagcacataaaaagcacccagggtgagaaagccccatcccgggggccgttggcaggcagggaagcaggaaccccaccgtgtgccccctgccagccccagagggagtggcgagcccagctgcccagccctgccccccctccccatagccagcacagctatcccgcggggacaccagcactgagccccctctccctcctgcaataattcggggagtctcagccccatccaggtgccgcggccagctctctacacctctatatattatattactatatagccgagctgttcttccttcctatggaagtcggaaacatggtcagaacacgatctgggggggggatcctgtcttcctccccaccccaccccactcttacccaatttctgggctctggatcctcacagtcatggaggcaccgtgggcctggcacttgcaaaagtgtggcccctcactctagtgtgtggtccctctcagggtcctggggatctgcctctctgtggtctccatcctgactcttgaacttacccacaataagaataaattctgcctcatcttt

SEQ ID NO: 213 - DNA, 3945 bp, Homo sapiens
  Homo sapiens EphB4 (EPHB4), mRNA
cgtccacccgcccagggagagtcagacctgggggggcgagggccccccaaactcagttcggatcctacccgagtgaggcggcgccatggagctccgggtgctgctctgctgggcttcgttggccgcagctttggaagagaccctgctgaacacaaaattggaaactgctgatctgaagtgggtgacattccctcaggtggacgggcagtgggaggaactgagcggcctggatgaggaacagcacagcgtgcgcacctacgaagtgtgtgaagtgcagcgtgccccgggccaggcccactggcttcgcacaggttgggtcccacggcggggcgccgtccacgtgtacgccacgctgcgcttcaccatgctcgagtgcctgtccctgcctcgggctgggcgctcctgcaaggagaccttcaccgtcttctactatgagagcgatgcggacacggccacggccctcacgccagcctggatggagaacccctacatcaaggtggacacggtggccgcggagcatctcacccggaagcgccctggggccgaggccaccgggaaggtgaatgtcaagacgctgcgtctgggaccgctcagcaaggctggcttctacctggccttccaggaccagggtgcctgcatggccctgctatccctgcacctcttctacaaaaagtgcgcccagctgactgtgaacctgactcgattcccggagactgtgcctcgggagctggttgtgcccgtggccggtagctgcgtggtggatgccgtccccgcccctggccccagccccagcctctactgccgtgaggatggccagtgggccgaacagccggtcacgggctgcagctgtgctccggggttcgaggcagctgaggggaacaccaagtgccgagcctgtgcccagggcaccttcaagcccctgtcaggagaagggtcctgccagccatgcccagccaatagccactctaacaccattggatcagccgtctgccagtgccgcgtcgggtacttccgggcacgcacagacccccggggtgcaccctgcaccacccctccttcggctccgcggagcgtggtttcccgcctgaacggctcctccctgcacctggaatggagtgcccccctggagtctggtggccgagaggacctcacctacgccctccgctgccgggagtgccgacccggaggctcctgtgcgccctgcgggggagacctgacttttgaccccggcccccgggacctggtggagccctgggtggtggttcgagggctacgtccggacttcacctatacctttgaggtcactgcattgaacggggtatcctccttagccacggggcccgtcccatttgagcctgtcaatgtcaccactgaccgagaggtacctcctgcagtgtctgacatccgggtgacgcggtcctcacccagcagcttgagcctggcctgggctgttccccgggcacccagtggggcgtggctggactacgaggtcaaataccatgagaagggcgccgagggtcccagcagcgtgcggttcctgaagacgtcagaaaaccgggcagagctgcgggggctgaagcggggagccagctacctggtgcaggtacgggcgcgctctgaggccggctacgggcccttcggccaggaacatcacagccagacccaactggatgagagcgagggctggcgggagcagctggccctgattgcgggcacggcagtcgtgggtgtggtcctggtcctggtggtcattgtggtcgcagttctctgcctcaggaagcagagcaatgggagagaagcagaatattcggacaaacacggacagtatctcatcggacatggtactaaggtctacatcgaccccttcacttatgaagaccctaatgaggctgtgagggaatttgcaaaagagatcgatgtctcctacgtcaagattgaagaggtgattggtgcaggtgagtttggcgaggtgtgccgggggcggctcaaggccccagggaagaaggagagctgtgtggcaatcaagaccctgaagggtggctacacggagcggcagcggcgtgagtttctgagcgaggcctccatcatgggccagttcgagcaccccaatatcatccgcctggagggcgtggtcaccaacagcatgcccgtcatgattctcacagagttcatggagaacggcgccctggactccttcctgcggctaaacgacggacagttcacagtcatccagctcgtgggcatgctgcggggcatcgcctcgggcatgcggtaccttgccgagatgagctacgtccaccgagacctggctgctcgcaacatcctagtcaacagcaacctcgtctgcaaagtgtctgactttggcctttcccgattcctggaggagaactcttccgatcccacctacacgagctccctgggaggaaagattcccatccgatggactgccccggaggccattgccttccggaagttcacttccgccagtgatgcctggagttacgggattgtgatgtgggaggtgatgtcatttggggagaggccgtactgggacatgagcaatcaggacgtgatcaatgccattgaacaggactaccggctgcccccgcccccagactgtcccacctccctccaccagctcatgctggactgttggcagaaagaccggaatgcccggccccgcttcccccaggtggtcagcgccctggacaagatgatccggaaccccgccagcctcaaaatcgtggcccgggagaatggcggggcctcacaccctctcctggaccagcggcagcctcactactcagcttttggctctgtgggcgagtggcttcgggccatcaaaatgggaagatacgaagaaagtttcgcagccgctggctttggctccttcgagctggtcagccagatctctgctgaggacctgctccgaatcggagtcactctggcgggacaccagaagaaaatcttggccagtgtccagcacatgaagtcccaggccaagccgggaaccccgggtgggacaggaggaccggccccgcagtactgacctgcaggaactccccaccccagggacaccgcctccccattttccggggcagagtggggactcacagaggcccccagccctgtgccccgctggattgcactttgagcccgtggggtgaggagttggcaatttggagagacaggatttgggggttctgccataataggaggggaaaatcaccccccagccacctcggggaactccagaccaagggtgagggcgcctttccctcaggactgggtgtgaccagaggaaaaggaagtgcccaacatctcccagcctccccaggtgcccccctcaccttgatgggtgcgttcccgcagaccaaagagagtgtgactcccttgccagctccagagtgggggggctgtcccagggggcaagaaggggtgtcagggcccagtgacaaaatcattggggtttgtagtcccaacttgctgctgtcaccaccaaactcaatcatttttttcccttgtaaatgcccctcccccagctgctgccttcatattgaaggtttttgagttttgtttttggtcttaatttttctccccgttccctttttgtttcttcgttttgtttttctaccgtccttgtcataactttgtgttggagggaacctgtttcactatggcctcctttgcccaagttgaaacaggggcccatcatcatgtctgtttccagaacagtgccttggtcatcccacatccccggaccccgcctgggacccccaagctgtgtcctatgaaggggtgtggggtgaggtagtgaaaagggcggtagttggtggtggaacccagaaacggacgccggtgcttggaggggttcttaaattatatttaaaaaagtaactttttgtataaataaaagaaaatgggacgtgtcccagctccaggggt

SEQ ID NO: 214 - DNA, 3805 bp, Homo sapiens
  Homo sapiens EphB3 (EPHB3), mRNA
ggctcggctcctagagctgccacggccatggccagagcccgcccgccgccgccgccgtcgccgccgccggggcttctgccgctgctccctccgctgctgctgctgccgctgctgctgctgcccgccggctgccgggcgctggaagagaccctcatggacacaaaatgggtaacatctgagttggcgtggacatctcatccagaaagtgggtgggaagaggtgagtggctacgatgaggccatgaatcccatccgcacataccaggtgtgtaatgtgcgcgagtcaagccagaacaactggcttcgcacggggttcatctggcggcgggatgtgcagcgggtctacgtggagctcaagttcactgtgcgtgactgcaacagcatccccaacatccccggctcctgcaaggagaccttcaacctcttctactacgaggctgacagcgatgtggcctcagcctcctcccccttctggatggagaacccctacgtgaaagtggacaccattgcacccgatgagagcttctcgcggctggatgccggccgtgtcaacaccaaggtgcgcagctttgggccactttccaaggctggcttctacctggccttccaggaccagggcgcctgcatgtcgctcatctccgtgcgcgccttctacaagaagtgtgcatccaccaccgcaggcttcgcactcttccccgagaccctcactggggcggagcccacctcgctggtcattgctcctggcacctgcatccctaacgccgtggaggtgtcggtgccactcaagctctactgcaacggcgatggggagtggatggtgcctgtgggtgcctgcacctgtgccaccggccatgagccagctgccaaggagtcccagtgccgcccctgtccccctgggagctacaaggcgaagcagggagaggggccctgcctcccatgtccccccaacagccgtaccacctccccagccgccagcatctgcacctgccacaataacttctaccgtgcagactcggactctgcggacagtgcctgtaccaccgtgccatctccaccccgaggtgtgatctccaatgtgaatgaaacctcactgatcctcgagtggagtgagccccgggacctgggtggccgggatgacctcctgtacaatgtcatctgcaagaagtgccatggggctggaggggcctcagcctgctcacgctgtgatgacaacgtggagtttgtgcctcggcagctgggcctgacggagcgccgggtccacatcagccatctgctggcccacacgcgctacacctttgaggtgcaggcggtcaacggtgtctcgggcaagagccctctgccgcctcgttatgcggccgtgaatatcaccacaaaccaggctgccccgtctgaagtgcccacactacgcctgcacagcagctcaggcagcagcctcaccctatcctgggcacccccagagcggcccaacggagtcatcctggactacgagatgaagtactttgagaagagcgagggcatcgcctccacagtgaccagccagatgaactccgtgcagctggacgggcttcggcctgacgcccgctatgtggtccaggtccgtgcccgcacagtagctggctatgggcagtacagccgccctgccgagtttgagaccacaagtgagagaggctctggggcccagcagctccaggagcagcttcccctcatcgtgggctccgctacagctgggcttgtcttcgtggtggctgtcgtggtcatcgctatcgtctgcctcaggaagcagcgacacggctctgattcggagtacacggagaagctgcagcagtacattgctcctggaatgaaggtttatattgacccttttacctacgaggaccctaatgaggctgttcgggagtttgccaaggagatcgacgtgtcctgcgtcaagatcgaggaggtgatcggagctggggaatttggggaagtgtgccgtggtcgactgaaacagcctggccgccgagaggtgtttgtggccatcaagacgctgaaggtgggctacaccgagaggcagcggcgggacttcctaagcgaggcctccatcatgggtcagtttgatcaccccaatataatccggctcgagggcgtggtcaccaaaagtcggccagttatgatcctcactgagttcatggaaaactgcgccctggactccttcctccggctcaacgatgggcagttcacggtcatccagctggtgggcatgttgcggggcattgctgccggcatgaagtacctgtccgagatgaactatgtgcaccgcgacctggctgctcgcaacatccttgtcaacagcaacctggtctgcaaagtctcagactttggcctctcccgcttcctggaggatgacccctccgatcctacctacaccagttccctgggcgggaagatccccatccgctggactgccccagaggccatagcctatcggaagttcacttctgctagtgatgtctggagctacggaattgtcatgtgggaggtcatgagctatggagagcgaccctactgggacatgagcaaccaggatgtcatcaatgccgtggagcaggattaccggctgccaccacccatggactgtcccacagcactgcaccagctcatgctggactgctgggtgcgggaccggaacctcaggcccaaattctcccagattgtcaataccctggacaagctcatccgcaatgctgccagcctcaaggtcattgccagcgctcagtctggcatgtcacagcccctcctggaccgcacggtcccagattacacaaccttcacgacagttggtgattggctggatgccatcaagatggggcggtacaaggagagcttcgtcagtgcggggtttgcatcttttgacctggtggcccagatgacggcagaagacctgctccgtattggggtcaccctggccggccaccagaagaagatcctgagcagtatccaggacatgcggctgcagatgaaccagacgctgcctgtgcaggtctgacaccggctcccacggggaccctgaggaccgtgcagggatgccaagcagccggctggactttcggactcttggacttttggatgcctggccttaggctgtggcccagaagctggaagtttgggaaaggcccaagctgggacttctccaggcctgtgttccctccccaggaagtgcgccccaaacctcttcatattgaagatggattaggagagggggtgatgacccctccccaagcccctcagggcccagaccttcctgctctccagcaggggatccccacaacctcacacttgtctgttcttcagtgctggaggtcctggcagggtcaggctggggtaagccggggttccacagggcccagccctggcaggggtctggccccccaggtaggcggagagcagtccctccctcaggaactggaggaggggactccaggaatggggaaatgtgacaccaccatcctgaagccagcttgcacctccagtttgcacagggatttgtcctgggggctgagggccctgtccccacccccgcccttggtgctgtcataaaagggcaggcaggggcaggctgaggagttgccctttgccccccagagactgactctcagagccagagatgggatgtgtgagtgtgtgtgtgtgtgtgtgcgcgcgcgcgcgcgtgtgtgtgtgcacgcactggcctgcacagagagcatgggtgagcgtgtaaaagcttggccctgtgccctacaatggggccagctgggccgacagcagaataaaggcaataagatgaa

SEQ ID NO: 215 - DNA, 6057 bp, Homo sapiens
  Homo sapiens EphB2 (EPHB2), transcript variant 1, mRNA
  modified_base (4078): a, c, g, t, other or unknown
gccccgggaagcgcagccatggctctgcggaggctgggggccgcgctgctgctgctgccgctgctcgccgccgtggaagaaacgctaatggactccactacagcgactgctgagctgggctggatggtgcatcctccatcagggtgggaagaggtgagtggctacgatgagaacatgaacacgatccgcacgtaccaggtgtgcaacgtgtttgagtcaagccagaacaactggctacggaccaagtttatccggcgccgtggcgcccaccgcatccacgtggagatgaagttttcggtgcgtgactgcagcagcatccccagcgtgcctggctcctgcaaggagaccttcaacctctattactatgaggctgactttgactcggccaccaagaccttccccaactggatggagaatccatgggtgaaggtggataccattgcagccgacgagagcttctcccaggtggacctgggtggccgcgtcatgaaaatcaacaccgaggtgcggagcttcggacctgtgtcccgcagcggcttctacctggccttccaggactatggcggctgcatgtccctcatcgccgtgcgtgtcttctaccgcaagtgcccccgcatcatccagaatggcgccatcttccaggaaaccctgtcgggggctgagagcacatcgctggtggctgcccggggcagctgcatcgccaatgcggaagaggtggatgtacccatcaagctctactgtaacggggacggcgagtggctggtgcccatcgggcgctgcatgtgcaaagcaggcttcgaggccgttgagaatggcaccgtctgccgaggttgtccatctgggactttcaaggccaaccaaggggatgaggcctgtacccactgtcccatcaacagccggaccacttctgaaggggccaccaactgtgtctgccgcaatggctactacagagcagacctggaccccctggacatgccctgcacaaccatcccctccgcgccccaggctgtgatttccagtgtcaatgagacctccctcatgctggagtggacccctccccgcgactccggaggccgagaggacctcgtctacaacatcatctgcaagagctgtggctcgggccggggtgcctgcacccgctgcggggacaatgtacagtacgcaccacgccagctaggcctgaccgagccacgcatttacatcagtgacctgctggcccacacccagtacaccttcgagatccaggctgtgaacggcgttactgaccagagccccttctcgcctcagttcgcctctgtgaacatcaccaccaaccaggcagctccatcggcagtgtccatcatgcatcaggtgagccgcaccgtggacagcattaccctgtcgtggtcccagccagaccagcccaatggcgtgatcctggactatgagctgcagtactatgagaaggagctcagtgagtacaacgccacagccataaaaagccccaccaacacggtcaccgtgcagggcctcaaagccggcgccatctatgtcttccaggtgcgggcacgcaccgtggcaggctacgggcgctacagcggcaagatgtacttccagaccatgacagaagccgagtaccagacaagcatccaggagaagttgccactcatcatcggctcctcggccgctggcctggtcttcctcattgctgtggttgtcatcgccatcgtgtgtaacagaagacgggggtttgagcgtgctgactcggagtacacggacaagctgcaacactacaccagtggccacatgaccccaggcatgaagatctacatcgatcctttcacctacgaggaccccaacgaggcagtgcgggagtttgccaaggaaattgacatctcctgtgtcaaaattgagcaggtgatcggagcaggggagtttggcgaggtctgcagtggccacctgaagctgccaggcaagagagagatctttgtggccatcaagacgctcaagtcgggctacacggagaagcagcgccgggacttcctgagcgaagcctccatcatgggccagttcgaccatcccaacgtcatccacctggagggtgtcgtgaccaagagcacacctgtgatgatcatcaccgagttcatggagaatggctccctggactcctttctccggcaaaacgatgggcagttcacagtcatccagctggtgggcatgcttcggggcatcgcagctggcatgaagtacctggcagacatgaactatgttcaccgtgacctggctgcccgcaacatcctcgtcaacagcaacctggtctgcaaggtgtcggactttgggctctcacgctttctagaggacgatacctcagaccccacctacaccagtgccctgggcggaaagatccccatccgctggacagccccggaagccatccagtaccggaagttcacctcggccagtgatgtgtggagctacggcattgtcatgtgggaggtgatgtcctatggggagcggccctactgggacatgaccaaccaggatgtaatcaatgccattgagcaggactatcggctgccaccgcccatggactgcccgagcgccctgcaccaactcatgctggactgttggcagaaggaccgcaaccaccggcccaagttcggccaaattgtcaacacgctagacaagatgatccgcaatcccaacagcctcaaagccatggcgcccctctcctctggcatcaacctgccgctgctggaccgcacgatccccgactacaccagctttaacacggtggacgagtggctggaggccatcaagatggggcagtacaaggagagcttcgccaatgccggcttcacctcctttgacgtcgtgtctcagatgatgatggaggacattctccgggttgggctcactttggctggccaccagaaaaaaatcctgaacagtatccaggtgatgcgggcgcagatgaaccagattcagtctgtggaggtttgacattcacctgcctcggctcacctcttcctccaagccccgccccctctgccccacgtgccggccctcctggtgctctatccactgcagggccagccactcgccaggaggccacgggccacgggaagaaccaagcggtgccagccacgagacgtcaccaagaaaacatgcaactcaaacgacggaaaaaaaaagggaatgggaaaaaagaaaacagatcctgggagggggcgggaaatacaaggaatattttttaaagaggattctcataaggaaagcaatgactgttcttgcgggggataaaaaagggcttgggagattcatgcgatgtgtccaatcggagacaaaagcagtttctctccaactccctctgggaaggtgacctggccagagccaagaaacactttcagaaaaacaaatgtgaaggggagagacaggggccgcccttggctcctgtccctgctgctcctctaggcctcactcaacaaccaagcgcctggaggacgggacagatggacagacagccaccctgagaacccctctgggaaaatctattcctgccaccactgggcaaacagaagaatttttctgtctttggagagtattttagaaactccaatgaaagacactgtttctcctgttggctcacagggctgaaaggggcttttgtcctcctgggtcagggagaacgcggggaccccagaaaggtcagccttcctgaggatgggcaaccccaggtctgcagctccaggtacatatcacgcgcacagcctggcagcctggccctcctggtgcccactcccgccagcccctgcctcgaggactgatactgcagtgactgccgtcagctccgactgccgctgagaagggttgatcctgcatctgggtttgtttacagcaattcctggactcgggggtattttggtcacagggtggttttggtttagggggtttgtttgttgggttgttttttgttttttggttttttttaatgacaatgaagtgacactttgacatttcctaccttttgaggacttgatccttctccaggaagaaggtgctttctgcttactgacttaggcaatacaccaagggcganattttatatgcacatttctggatttttttatacggttttcattgacactcttccctcctcccacctgccaccaggcctcaccaaagcccactgccatggggccatctgggccattcagagactggagtgagatttgggtgtggagggggaggcgccaaggtggaggagcttcccactccaggactgttgatgaaagggacagattgaggaggaagtgggctctgaggctgcagggctggaagtccttgcccacttcccactctcctgccccaatctatctagtacttcccaggcaaataggcccctttgaggctcctgagtgccctcagatggtcaaaacccagttttccctctgggagcctaaaccaggctgcatcggaggccaggacccggatcattcactgtgataccctgccctccagagggtgcgctcagagacacgggcaagcatgcctcttcccttccctggagagaaagtgtgtgatttctctcccacctccttccccccaccagacctttgctgggcctaaaggtcttggccatggggacgccctcagtctagggatctggccacagactccctcctgtgaaccaacacagacacccaagcagagcaatcagttagtgaattggaattccccaagtctttgctattgtgaatagtgctgcaataaacatacgtgtgcatgtgtctttatagtagaatgatctataatcctctgggtatgtacccagtaatgggattgctgggtcaaatggtttttctggttctagatccttgaggaattgccacactgtctttcacaatggttgaactaatttacactcctaccaacagtgtaaaagtcttcctgtttctccacatcctctccagcatctgttgtttcctgactttttaatgattgccattctaactggtgtgagatggtatctcattgtgggtttgatttgcatttctctaatgaccagtgaagatgagctttttttcatatgtttgttggccacatgtttgttgtttcttttgagaagtgtctgttcataaccttcaccaatttttgatgaggttgtttgttcttttcttgtaaacttaatgaaataaagcatgaagacaagattagaagaaaaagaatgaaaaggaacaaacaaagcgtccaagaaatatgggactatgtgacaagaacaaacttacgtttgactggtgtgctgaaaatgacagggagaatgaaaccaagttggaaaacactcttcaggatattatccaggagaacttctccaacctagcaagacagaccaacgttcaaattcaggaaatacagagaacacccaaagatatttctcgagaagagcaacccgaagacacataattgtcagattcaccaaggttgaaatgaaggaaaaaatgctaagggcagccagagagaaaggtcaggttactcacaaaaggaagcccatcagactaacagcagatctctctgcagaaaccctacaacctagaagagagtggggaccaatattcaacattcacaaagaaaagaattttcaatccagaatttcatatccagccaaactaagcttcataagcaaaggagaaataaaatcctttacagacaagcaaatcctgggagattttgtcaccaccaggcctgccttacaagacatcctgaaggaagcactaaatatggaaaagaaaaactggtgccagccactgcaaaaaataccaaattgtagagaccattgacactatgaagaaaccgtgtcaactaatgggcaaaataaccagctagtatcataatgacaggatcagattcacacataacaatattaaccttatatctaaatgggctaaatcccccaattaaaagacgcagactggcaaattggttaaagagtcaagactcattggtgtgccgtattcaggagacccatctcacgtgcaaagacacacataggctcagagtaaaagggatacaggggaattc

SEQ ID NO: 216 - DNA, 3942 bp, Homo sapiens
  Homo sapiens EphB2 (EPHB2), transcript variant 2, mRNA
gccccgggaagcgcagccatggctctgcggaggctgggggccgcgctgctgctgctgccgctgctcgccgccgtggaagaaacgctaatggactccactacagcgactgctgagctgggctggatggtgcatcctccatcagggtgggaagaggtgagtggctacgatgagaacatgaacacgatccgcacgtaccaggtgtgcaacgtgtttgagtcaagccagaacaactggctacggaccaagtttatccggcgccgtggcgcccaccgcatccacgtggagatgaagttttcggtgcgtgactgcagcagcatccccagcgtgcctggctcctgcaaggagaccttcaacctctattactatgaggctgactttgactcggccaccaagaccttccccaactggatggagaatccatgggtgaaggtggataccattgcagccgacgagagcttctcccaggtggacctgggtggccgcgtcatgaaaatcaacaccgaggtgcggagcttcggacctgtgtcccgcagcggcttctacctggccttccaggactatggcggctgcatgtccctcatcgccgtgcgtgtcttctaccgcaagtgcccccgcatcatccagaatggcgccatcttccaggaaaccctgtcgggggctgagagcacatcgctggtggctgcccggggcagctgcatcgccaatgcggaagaggtggatgtacccatcaagctctactgtaacggggacggcgagtggctggtgcccatcgggcgctgcatgtgcaaagcaggcttcgaggccgttgagaatggcaccgtctgccgaggttgtccatctgggactttcaaggccaaccaaggggatgaggcctgtacccactgtcccatcaacagccggaccacttctgaaggggccaccaactgtgtctgccgcaatggctactacagagcagacctggaccccctggacatgccctgcacaaccatcccctccgcgccccaggctgtgatttccagtgtcaatgagacctccctcatgctggagtggacccctccccgcgactccggaggccgagaggacctcgtctacaacatcatctgcaagagctgtggctcgggccggggtgcctgcacccgctgcggggacaatgtacagtacgcaccacgccagctaggcctgaccgagccacgcatttacatcagtgacctgctggcccacacccagtacaccttcgagatccaggctgtgaacggcgttactgaccagagccccttctcgcctcagttcgcctctgtgaacatcaccaccaaccaggcagctccatcggcagtgtccatcatgcatcaggtgagccgcaccgtggacagcattaccctgtcgtggtcccagccagaccagcccaatggcgtgatcctggactatgagctgcagtactatgagaaggagctcagtgagtacaacgccacagccataaaaagccccaccaacacggtcaccgtgcagggcctcaaagccggcgccatctatgtcttccaggtgcgggcacgcaccgtggcaggctacgggcgctacagcggcaagatgtacttccagaccatgacagaagccgagtaccagacaagcatccaggagaagttgccactcatcatcggctcctcggccgctggcctggtcttcctcattgctgtggttgtcatcgccatcgtgtgtaacagacgggggtttgagcgtgctgactcggagtacacggacaagctgcaacactacaccagtggccacatgaccccaggcatgaagatctacatcgatcctttcacctacgaggaccccaacgaggcagtgcgggagtttgccaaggaaattgacatctcctgtgtcaaaattgagcaggtgatcggagcaggggagtttggcgaggtctgcagtggccacctgaagctgccaggcaagagagagatctttgtggccatcaagacgctcaagtcgggctacacggagaagcagcgccgggacttcctgagcgaagcctccatcatgggccagttcgaccatcccaacgtcatccacctggagggtgtcgtgaccaagagcacacctgtgatgatcatcaccgagttcatggagaatggctccctggactcctttctccggcaaaacgatgggcagttcacagtcatccagctggtgggcatgcttcggggcatcgcagctggcatgaagtacctggcagacatgaactatgttcaccgtgacctggctgcccgcaacatcctcgtcaacagcaacctggtctgcaaggtgtcggactttgggctctcacgctttctagaggacgatacctcagaccccacctacaccagtgccctgggcggaaagatccccatccgctggacagccccggaagccatccagtaccggaagttcacctcggccagtgatgtgtggagctacggcattgtcatgtgggaggtgatgtcctatggggagcggccctactgggacatgaccaaccaggatgtaatcaatgccattgagcaggactatcggctgccaccgcccatggactgcccgagcgccctgcaccaactcatgctggactgttggcagaaggaccgcaaccaccggcccaagttcggccaaattgtcaacacgctagacaagatgatccgcaatcccaacagcctcaaagccatggcgcccctctcctctggcatcaacctgccgctgctggaccgcacgatccccgactacaccagctttaacacggtggacgagtggctggaggccatcaagatggggcagtacaaggagagcttcgccaatgccggcttcacctcctttgacgtcgtgtctcagatgatgatggaggacattctccgggttggggtcactttggctggccaccagaaaaaaatcctgaacagtatccaggtgatgcgggcgcagatgaaccagattcagtctgtggagggccagccactcgccaggaggccacgggccacgggaagaaccaagcggtgccagccacgagacgtcaccaagaaaacatgcaactcaaacgacggaaaaaaaaagggaatgggaaaaaagaaaacagatcctgggagggggcgggaaatacaaggaatattttttaaagaggattctcataaggaaagcaatgactgttcttgcgggggataaaaaagggcttgggagattcatgcgatgtgtccaatcggagacaaaagcagtttctctccaactccctctgggaaggtgacctggccagagccaagaaacactttcagaaaaacaaatgtgaaggggagagacaggggccacccttggctcctgtccctgctgctcctctaggcctcactcaacaaccaagcgcctggaggacgggacagatggacagacagccaccctgagaacccctctgggaaaatctattcctgccaccactgggcaaacagaagaatttttctgtctttggagagtattttagaaactccaatgaaagacactgtttctcctgttggctcacagggctgaaaggggcttttgtcctcctgggtcagggagaacgcggggaccccagaaaggtcagccttcctgaggatgggcaacccccaggtctgcagctccaggtacatatcacgcgcacagcctggcagcctggccctcctggtgcccactcccgccagcccctgcctcgaggactgatactgcagtgactgccgtcagctccgactgccgctgagaagggttgatcctgcatctgggtttgtttacagcaattcctggactcgggggtattttggtcacagggtggttttggtttagggggtttgtttgttgggttgttttttgttttttggttttttttaatgacaatgaagtgacactttgacatttccaaaaaaaaaaaaaaaaaaaaaaaaaaaaaaaaaaaaa

SEQ ID NO: 217 - DNA, 4010 bp, Homo sapiens
  Homo sapiens EphB6 (EPHB6), mRNA
cggagggggcgggccgggctgcgttcgctccagccgcggctctacagcagcgggcggcgggacccgggacccagcttggcgacggcgattctcgacgcgggcccccaggattctcccggcgccccacctctggagcagcccctgccgccagcgtcaggtccaccccggaatcccagggactctcggcgccgaacggacccgggccggtgcaacggggtccccggactggagaagacgcgggtggcaccgtgcgagctccaggagccccgggtccactgcgaggcctcggggggcgcagacctgcagagactgcggccaacgggaagaaataaagggattatagtccacccaattcacagacttctgagactcagacacgaggagagatagagaaccgccaatctctagatcaacaagcaaaggaggtgccaagcctgtttgtcttcattgtgacactggagtctagatgctgggaagtccaagatcagggtgccggcatggtcagttcctggcgaagcctctcttctaggtttcagactgccctcttctttgttgtgtcctcgaatggcagaaaaaggggtggctgttggaggaagggaggagagtaaatgaagagaaagaactggaataaccccttgcagaaaaaaaaaaaaagggaagcttagctgtacaccctgagtcttgcaaaagctgcagccccacccaggagcagggtggtggctggggcgatggtggacgccctgaagatgtcccatggctactgaaggggctgcccagttagggaacagagtggcgggcatggtgtgtagcctatgggtgctgctcctggtgtcttcagttctggctctggaagaggtattgctggacaccaccggagagacatctgagattggctggctcacctacccaccaggggggtgggacgaggtgagtgttctggacgaccagcgacgcctgactcggacctttgaggcatgtcatgtggcaggggcccctccaggcaccgggcaggacaattggttgcagacacactttgtggagcggcgcggggcccagagggcgcacattcgactccacttctctgtgcgggcatgctccagcctgggtgtgagcggcggcacctgccgggagaccttcaccctttactaccgtcaggctgaggagcccgacagccctgacagcgtttcctcctggcacctcaaacgctggaccaaggtggacacaattgcagcagacgagagctttccctcctcctcctcctcctcctcctcttcttcctctgcagcgtgggctgtgggaccccacggggctgggcagcgggctggactgcaactgaacgtcaaagagcggagctttgggcctctcacccaacgcggcttctacgtggccttccaggacacgggggcctgcctggccctggtcgctgtcaggctcttctcctacacctgccctgccgtgctccgatcctttgcttcctttccagagacgcaggccagtggggctgggggggcctccctggtggcagctgtgggcacctgtgtggctcatgcagagccagaggaggatggagtagggggccaggcaggaggcagcccccccaggctgcactgcaacggggagggcaagtggatggtagctgtcgggggctgccgctgccagcctggataccaaccagcacgaggagacaaggcctgccaagcctgcccacgggggctctataagtcttctgctgggaatgctccctgctcaccatgccctgcccgcagtcacgctcccaacccagcagcccccgtttgcccctgcctggagggcttctaccgggccagttccgacccaccagaggccccctgcactggtcctccatcggctccccaggagctttggtttgaggtgcaaggctcagcactcatgctacactggcgcctgcctcgggagctggggggtcgaggggacctgctcttcaatgtcgtgtgcaaggagtgtgaaggccgccaggaacctgccagcggtggtgggggcacttgtcaccgctgcagggatgaggtccacttcgaccctcgccagagaggcctgactgagagccgagtgttagtggggggactccgggcacacgtaccctacatcttagaggtgcaggctgttaatggggtgtctgagctcagccctgaccctcctcaggctgcagccatcaatgtcagcaccagccatgaagtgccctctgctgtccctgtggtgcaccaggtgagccgggcatccaacagcatcacggtgtcctggccgcagcccgaccagaccaatgggaacatcctggactatcagctccgctactatgaccaggcagaagacgaatcccactccttcaccctgaccagcgagaccaacactgccaccgtgacacagctgagccctggccacatctatggtttccaggtgcgggcccggactgctgccggccacggcccctacgggggcaaagtctatttccagacacttcctcaaggggagctgtcttcccagcttccggaaagactctccttggtgatcggctccatcctgggggctttggccttcctcctgctggcagccatcaccgtgctggcggtcgtcttccagcggaagcggcgtgggactggctacacggagcagctgcagcaatacagcagcccaggactcggggtgaagtattacatcgacccctccacctacgaggacccctgtcaggccatccgagaacttgcccgggaagtcgatcctgcttatatcaagattgaggaggtcattgggacaggctcttttggagaagtgcgccagggccgcctgcagccacggggacggagggagcagactgtggccatccaggccctgtgggccgggggcgccgaaagcctgcagatgaccttcctgggccgggccgcagtgctgggtcagttccagcaccccaacatcctgcggctggagggcgtggtcaccaagagccgacccctcatggtgctgacggagttcatggagcttggccccctggacagcttcctcaggcagcgggagggccagttcagcagcctgcagctggtggccatgcagcggggagtggctgctgccatgcagtacctgtccagctttgccttcgtccatcgctcgctgtctgcccacagcgtgctggtgaatagccacttggtgtgcaaggtggcccgtcttggccacagtcctcagggcccaagttgtttgcttcgctgggcagccccagaggtcattgcacatggaaagcatacaacatccagtgatgtctggagctttgggatactcatgtgggaagtgatgagttatggagaacggccttactgggacatgagtgagcaggaggtactaaatgcaatagagcaggagttccggctgcccccgcctccaggctgtcctcctggattacatctacttatgttggacacttggcagaaggaccgtgcccggcggcctcattttgaccagctggtggctgcatttgacaagatgatccgcaagccagataccctgcaggctggcggggacccaggggaaaggccttcccaggcccttctgacccctgtggccctggactttccttgtctggactcaccccaggcctggctttcagccattggactggagtgctaccaggacaacttctccaagtttggcctctgtaccttcagtgatgtggctcagctcagcctagaagacctgcctgccctgggcatcaccctggctggccaccagaagaagctgctgcaccacatccagctccttcagcaacacctgaggcagcagggctcagtggaggtctgagaatgacgatacccgtgactcagccctggacactggtccgagaagggacatgtgggacgtgagccgggctccaacagcctctgtgagagatgccccacaccaaacccaaccctcccgatggctgcattccctggtcctccgcctctccaccagccccctcctcattaaagggaaagaagggaatttgcaaa

SEQ ID NO: 218 - DNA, 3107 bp, Homo sapiens
  Homo sapiens EphA4 (EPHA4), mRNA
aagcggcaggagcagcgttggcaccggcgaaccatggctgggattttctatttcgccctattttcgtgtctcttcgggatttgcgacgctgtcacaggttccagggtataccccgcgaatgaagttaccttattggattccagatctgttcagggagaacttgggtggatagcaagccctctggaaggagggtgggaggaagtgagtatcatggatgaaaaaaatacaccaatccgaacctaccaagtgtgcaatgtgatggaacccagccagaataactggctacgaactgattggatcacccgagaaggggctcagagggtgtatattgagattaaattcaccttgagggactgcaatagtcttccgggcgtcatggggacttgcaaggagacgtttaacctgtactactatgaatcagacaacgacaaagagcgtttcatcagagagaaccagtttgtcaaaattgacaccattgctgctgatgagagcttcacccaagtggacattggtgacagaatcatgaagctgaacaccgagatccgggatgtagggccattaagcaaaaaggggttttacctggcttttcaggatgtgggggcctgcatcgccctggtatcagtccgtgtgttctataaaaagtgtccactcacagtccgcaatctggcccagtttcctgacaccatcacaggggctgatacgtcttccctggtggaagttcgaggctcctgtgtcaacaactcagaagagaaagatgtgccaaaaatgtactgtggggcagatggtgaatggctggtacccattggcaactgcctatgcaacgctgggcatgaggagcggagcggagaatgccaagcttgcaaaattggatattacaaggctctctccacggatgccacctgtgccaagtgcccaccccacagctactctgtctgggaaggagccacctcgtgcacctgtgaccgaggctttttcagagctgacaacgatgctgcctctatgccctgcacccgtccaccatctgctcccctgaacttgatttcaaatgtcaacgagacatctgtgaacttggaatggagtagccctcagaatacaggtggccgccaggacatttcctataatgtggtatgcaagaaatgtggagctggtgaccccagcaagtgccgaccctgtggaagtggggtccactacaccccacagcagaatggcttgaagaccaccaaagtctccatcactgacctcctagctcataccaattacacctttgaaatctgggctgtgaatggagtgtccaaatataaccctaacccagaccaatcagtttctgtcactgtgaccaccaaccaagcagcaccatcatccattgctttggtccaggctaaagaagtcacaagatacagtgtggcactggcttggctggaaccagatcggcccaatggggtaatcctggaatatgaagtcaagtattatgagaaggatcagaatgagcgaagctatcgtatagttcggacagctgccaggaacacagatatcaaaggcctgaaccctctcacttcctatgttttccacgtgcgagccaggacagcagctggctatggagacttcagtgagcccttggaggttacaaccaacacagtgccttcccggatcattggagatggggctaactccacagtccttctggtctctgtctcgggcagtgtggtgctggtggtaattctcattgcagcttttgtcatcagccggagacggagtaaatacagtaaagccaaacaagaagcggatgaagagaaacatttgaatcaaggtgtaagaacatatgtggacccctttacgtacgaagatcccaaccaagcagtgcgagagtttgccaaagaaattgacgcatcctgcattaagattgaaaaagttataggagttggtgaatttggtgaggtatgcagtgggcgtctcaaagtgcctggcaagagagagatctgtgtggctatcaagactctgaaagctggttatacagacaaacagaggagagacttcctgagtgaggccagcatcatgggacagtttgaccatccgaacatcattcacttggaaggcgtggtcactaaatgtaaaccagtaatgatcataacagagtacatggagaatggctccttggatgcattcctcaggaaaaatgatggcagatttacagtcattcagctggtgggcatgcttcgtggcattgggtctgggatgaagtatttatctgatatgagctatgtgcatcgtgatctggccgcacggaacatcctggtgaacagcaacttggtctgcaaagtgtctgattttggcatgtcccgagtgcttgaggatgatccggaagcagcttacaccaccaggggtggcaagattcctatccggtggactgcgccagaagcaattgcctatcgtaaattcacatcagcaagtgatgtatggagctatggaatcgttatgtgggaagtgatgtcgtacggggagaggccctattgggatatgtccaatcaagatgtgattaaagccattgaggaaggctatcggttaccccctccaatggactgccccattgcgctccaccagctgatgctagactgctggcagaaggagaggagcgacaggcctaaatttgggcagattgtcaacatgttggacaaactcatccgcaaccccaacagcttgaagaggacagggacggagagctccagacctaacactgccttgttggatccaagctcccctgaattctctgctgtggtatcagtgggcgattggctccaggccattaaaatggaccggtataaggataacttcacagctgctggttataccacactagaggctgtggtgcacgtgaaccaggaggacctggcaagaattggtatcacagccatcacgcaccagaataagattttgagcagtgtccaggcaatgcgaacccaaatgcagcagatgcacggcagaatggttcccgtctgagccagtactgaataaactcaaaactcttgaaattagtttacctcatccatgcactttaattgaagaactgcactttttttacttcgtcttcgccctctgaaattaaagaaatg

SEQ ID NO: 219 - DNA, 3370 bp, Homo sapiens
  Homo sapiens EphA1 (EPHA1), mRNA
gcccccgcccggcccgccccgctctcctagtcccttgcaacctggcgctgcatccgggccactgtcccaggtcccaggtcccggcccggagctatggagcggcgctggcccctggggctagggctggtgctgctgctctgcgccccgctgcccccgggggcgcgcgccaaggaagttactctgatggacacaagcaaggcacagggagagctgggctggctgctggatcccccaaaagatgggtggagtgaacagcaacagatactgaatgggacacccctctacatgtaccaggactgcccaatgcaaggacgcagagacactgaccactggcttcgctccaattggatctaccgcggggaggaggcttcccgcgtccacgtggagctgcagttcaccgtgcgggactgcaagagtttccctgggggagccgggcctctgggctgcaaggagaccttcaaccttctgtacatggagagtgaccaggatgtgggcattcagctccgacggcccttgttccagaaggtaaccacggtggctgcagaccagagcttcaccattcgagaccttgcgtctggctccgtgaagctgaatgtggagcgctgctctctgggccgcctgacccgccgtggcctctacctcgctttccacaacccgggtgcctgtgtggccctggtgtctgtccgggtcttctaccagcgctgtcctgagaccctgaatggcttggcccaattcccagacactctgcctggccccgctgggttggtggaagtggcgggcacctgcttgccccacgcgcgggccagccccaggccctcaggtgcaccccgcatgcactgcagccctgatggcgagtggctggtgcctgtaggacggtgccactgtgagcctggctatgaggaaggtggcagtggcgaagcatgtgttgcctgccctagcggctcctaccggatggacatggacacaccccattgtctcacgtgcccccagcagagcactgctgagtctgagggggccaccatctgtacctgtgagagcggccattacagagctcccggggagggcccccaggtggcatgcacaggtcccccctcggccccccgaaacctgagcttctctgcctcagggactcagctctccctgcgttgggaacccccagcagatacggggggacgccaggatgtcagatacagtgtgaggtgttcccagtgtcagggcacagcacaggacggggggccctgccagccctgtggggtgggcgtgcacttctcgccgggggcccgggcgctcaccacacctgcagtgcatgtcaatggccttgaaccttatgccaactacacctttaatgtggaagcccaaaatggagtgtcagggctgggcagctctggccatgccagcacctcagtcagcatcagcatggggcatgcagagtcactgtcaggcctgtctctgagactggtgaagaaagaaccgaggcaactagagctgacctgggcggggtcccggccccgaagccctggggcgaacctgacctatgagctgcacgtgctgaaccaggatgaagaacggtaccagatggttctagaacccagggtcttgctgacagagctgcagcctgacaccacatacatcgtcagagtccgaatgctgaccccactgggtcctggccctttctcccctgatcatgagtttcggaccagcccaccagtgtccaggggcctgactggaggagagattgtagccgtcatctttgggctgctgcttggtgcagccttgctgcttgggattctcgttttccggtccaggagagcccagcggcagaggcagcagaggcacgtgaccgcgccaccgatgtggatcgagaggacaagctgtgctgaagccttatgtggtacctccaggcatacgaggaccctgcacagggagccttggactttacccggaggctggtctaattttccttcccgggagcttgatccagcgtggctgatggtggacactgtcataggagaaggagagtttggggaagtgtatcgagggaccctcaggctccccagccaggactgcaagactgtggccattaagaccttaaaagacacatccccaggtggccagtggtggaacttccttcgagaggcaactatcatgggccagtttagccacccgcatattctgcatctggaaggcgtcgtcacaaagcgaaagccgatcatgatcatcacagaatttatggagaatgcagccctggatgccttcctgagggagcgggaggaccagctggtccctgggcagctagtggccatgctgcagggcatagcatctggcatgaactacctcagtaatcacaattatgtccaccgggacctggctgccagaaacatcttggtgaatcaaaacctgtgctgcaaggtgtctgactttggcctgactcgcctcctggatgactttgatggcacatacgaaacccagggaggaaagatccctatccgttggacagcccctgaagccattgcccatcggatcttcaccacagccagcgatgtgtggagctttgggattgtgatgtgggaggtgctgagctttggggacaagccttatggggagatgagcaatcaggaggttatgaagagcattgaggatgggtaccggttgccccctcctgtggactgccctgcccctctgtatgagctcatgaagaactgctgggcatatgaccgtgcccgccggccacacttccagaagcttcaggcacatctggagcaactgcttgccaacccccactccctgcggaccattgccaactttgaccccagggtgactcttcgcctgcccagcctgagtggctcagatgggatcccgtatcgaaccgtctctgagtggctcgagtccatacgcatgaaacgctacatcctgcacttccactcggctgggctggacaccatggagtgtgtgctggagctgaccgctgaggacctgacgcagatgggaatcacactgcccgggcaccagaagcgcattctttgcagtattcagggattcaaggactgatccctcctctcaccccatgcccaatcagggtgcaaggagcaaggacggggccaaggtcgctcatggtcactccctgcgccccttcccacaacctgccagactaggctatcggtgctgcttctgcccgctttaaggagaaccctgctctgcaccccagaaaacctctttgttttaaaagggaggtgggggtagaagtaaaaggatgatcatgggagggagctcaggggttaatatatatacatacatacacatatatatattgttgtaaataaacaggaaatgattttctgcctccatcccacccatcagggctgcaggcact

SEQ ID NO: 220 - DNA, 3149 bp, Homo sapiens
  Homo sapiens EphA3 (EPHA3), mRNA
ccatggatggtaacttctccagcaatcagagcgctccccctcacatcagtggcatgcttcatggagatatgctcctctcactgccctctgcaccagcaacatggattgtcagctctccatcctcctccttctcagctgctctgttctcgacagcttcggggaactgattccgcagccttccaatgaagtcaatctactggattcaaaaacaattcaaggggagctgggctggatctcttatccatcacatgggtgggaagagatcagtggtgtggatgaacattacacacccatcaggacttaccaggtgtgcaatgtcatggaccacagtcaaaacaattggctgagaacaaactgggtccccaggaactcagctcagaagatttatgtggagctcaagttcactctacgagactgcaatagcattccattggttttaggaacttgcaaggagacattcaacctgtactacatggagtctgatgatgatcatggggtgaaatttcgagagcatcagtttacaaagattgacaccattgcagctgatgaaagtttcactcaaatggatcttggggaccgtattctgaagctcaacactgagattagagaagtaggtcctgtcaacaagaagggattttatttggcatttcaagatgttggtgcttgtgttgccttggtgtctgtgagagtatacttcaaaaagtgcccatttacagtgaagaatctggctatgtttccagacacggtacccatggactcccagtccctggtggaggttagagggtcttgtgtcaacaattctaaggaggaagatcctccaaggatgtactgcagtacagaaggcgaatggcttgtacccattggcaagtgttcctgcaatgctggctatgaagaaagaggttttatgtgccaagcttgtcgaccaggtttctacaaggcattggatggtaatatgaagtgtgctaagtgcccgcctcacagttctactcaggaagatggttcaatgaactgcaggtgtgagaataattacttccgggcagacaaagaccctccatccatggcttgtacccgacctccatcttcaccaagaaatgttatctctaatataaacgagacctcagttatcctggactggagttggcccctggacacaggaggccggaaagatgttaccttcaacatcatatgtaaaaaatgtgggtggaatataaaacagtgtgagccatgcagcccaaatgtccgcttcctccctcgacagtttggactcaccaacaccacggtgacagtgacagaccttctggcacatactaactacacctttgagattgatgccgttaatggggtgtcagagctgagctccccaccaagacagtttgctgcggtcagcatcacaactaatcaggctgctccatcacctgtcctgacgattaagaaagatcggacctccagaaatagcatctctttgtcctggcaagaacctgaacatcctaatgggatcatattggactacgaggtcaaatactatgaaaagcaggaacaagaaacaagttataccattctgagggcaagaggcacaaatgttaccatcagtagcctcaagcctgacactatatacgtattccaaatccgagcccgaacagccgctggatatgggacgaacagccgcaagtttgagtttgaaactagtccagactctttctccatctctggtgaaagtagccaagtggtcatgatcgccatttcagcggcagtagcaattattctcctcactgttgtcatctatgttttgattgggaggttctgtggctataagtcaaaacatggggcagatgaaaaaagacttcattttggcaatgggcatttaaaacttccaggtctcaggacttatgttgacccacatacatatgaagaccctacccaagctgttcatgagtttgccaaggaattggatgccaccaacatatccattgataaagttgttggagcaggtgaatttggagaggtgtgcagtggtcgcttaaaacttccttcaaaaaaagagatttcagtggccattaaaaccctgaaagttggctacacagaaaagcagaggagagacttcctgggagaagcaagcattatgggacagtttgaccaccccaatatcattcgactggaaggagttgttaccaaaagtaagccagttatgattgtcacagaatacatggagaatggttccttggatagtttcctacgtaaacacgatgcccagtttactgtcattcagctagtggggatgcttcgagggatagcatctggcatgaagtacctgtcagacatgggctatgttcaccgagacctcgctgctcggaacatcttgatcaacagtaacttggtgtgtaaggtttctgatttcggactttcgcgtgtcctggaggatgacccagaagctgcttatacaacaagaggagggaagatcccaatcaggtggacatcaccagaagctatagcctaccgcaagttcacgtcagccagcgatgtatggagttatgggattgttctctgggaggtgatgtcttatggagagagaccatactgggagatgtccaatcaggatgtaattaaagctgtagatgagggctatcgactgccaccccccatggactgcccagctgccttgtatcagctgatgctggactgctggcagaaagacaggaacaacagacccaagtttgagcagattgttagtattctggacaagcttatccggaatcccggcagcctgaagatcatcaccagtgcagccgcaaggccatcaaaccttcttctggaccaaagcaatgtggatatctctaccttccgcacaacaggtgactggcttaatggtgtccggacagcacactgcaaggaaatcttcacgggcgtggagtacagttcttgtgacacaatagccaagatttccacagatgacatgaaaaaggttggtgtcaccgtggttgggccacagaagaagatcatcagtagcattaaagctctagaaacgcaatcaaagaatggcccagttcccgtgtaaagcacgacggaagtgcttctggacggaagtggtggctgtggaaggcgtcaagtcatcctgcagacagacaataattctggagatactggtggaagtt

SEQ ID NO: 221 - DNA, 1181 bp, Homo sapiens
  Homo sapiens ephrin-A4 (EFNA4), mRNA
gccagaccaaaccggacctcgggggcgatgcggctgctgcccctgctgcggactgtcctctgggccgcgttcctcggctcccctctgcgcgggggctccagcctccgccacgtagtctactggaactccagtaaccccaggttgcttcgaggagacgccgtggtggagctgggcctcaacgattacctagacattgtctgcccccactacgaaggcccagggccccctgagggccccgagacgtttgctttgtacatggtggactggccaggctatgagtcctgccaggcagagggcccccgggcctacaagcgctgggtgtgctccctgccctttggccatgttcaattctcagagaagattcagcgcttcacacctttctccctcggctttgagttcttacctggagagacttactactacatctcggtgcccactccagagagttctggccagtgcttgaggctccaggtgtctgtctgctgcaaggagaggaagtctgagtcagcccatcctgttgggagccctggagagagtggcacatcagggtggcgagggggggacactcccagccccctctgtctcttgctattactgctgcttctgattcttcgtcttctgcgaattctgtgagccaagcagaccttccctctcatcccaaggagccagagtcctcccaagatcccctggaggaggaggatccctgctgcctgcactgggggtgccaattcagaccgacaagatggagcattgatgggggagatcagagggtctgaggtgactcttgcaggagcctgtcccctcatcacaggctaaagaagagcagtagacagccctggacactctgaagcagaggcaagacaaacacaggcgctttgcaggctgctctgagggtctcagcccatcccccaggaggactggatttggtatgatcaaatcctcaaggccacgtgggggccccaggctgaagacctgggacaggtcgattgctggaccagggcaaagaagaagccctgcctactgtgccctgtggccttttccctggggcagcaccttgccctccccaggggatcactcacttgtcttctatgaagacggactcttcatgaggttgaatttcatgccagtttgtatttttataagtatctagaccaaaccttcaataaaccactcatctttta

SEQ ID NO: 222 - DNA, 717 bp, Homo sapiens
  Homo sapiens ephrin-A3 (EFNA3), mRNA
atggcggcggctccgctgctgctgctgctgctgctcgtgcccgtgccgctgctgccgctgctggcccaagggcccggaggggcgctgggaaaccggcatgcggtgtactggaacagctccaaccagcacctgcggcgagagggctacaccgtgcaggtgaacgtgaacgactatctggatatttactgcccgcactacaacagctcgggggtgggccccggggcgggaccggggcccggaggcggggcagagcagtacgtgctgtacatggtgagccgcaacggctaccgcacctgcaacgccagccagggcttcaagcgctgggagtgcaaccggccgcacgccccgcacagccccatcaagttctcggagaagttccagcgctacagcgccttctctctgggctacgagttccacgccggccacgagtactactacatctccacgcccactcacaacctgcactggaagtgtctgaggatgaaggtgttcgtctgctgcgcctccacatcgcactccggggagaagccggtccccactctcccccagttcaccatgggccccaatgtgaagatcaacgtgctggaagactttgagggagagaaccctcaggtgcccaagcttgagaagagcatcagcgggaccagccccaaacgggaacacctgcccctggccgtgggcatcgccttcttcctcatgacgttcttggcctcctag

SEQ ID NO: 223 - DNA, 3921 bp, Homo sapiens
  Homo sapiens EphA2 (EPHA2), mRNA
cggaagttgcgcgcaggccggcgggcgggagcggacaccgaggccggcgtgcaggcgtgcgggtgtgcgggagccgggctcggggggatcggaccgagagcgagaagcgcggcatggagctccaggcagcccgcgcctgcttcgccctgctgtggggctgtgcgctggccgcggccgcggcggcgcagggcaaggaagtggtactgctggactttgctgcagctggaggggagctcggctggctcacacacccgtatggcaaagggtgggacctgatgcagaacatcatgaatgacatgccgatctacatgtactccgtgtgcaacgtgatgtctggcgaccaggacaactggctccgcaccaactgggtgtaccgaggagaggctgagcgtaacaactttgagctcaactttactgtacgtgactgcaacagcttccctggtggcgccagctcctgcaaggagactttcaacctctactatgccgagtcggacctggactacggcaccaacttccagaagcgcctgttcaccaagattgacaccattgcgcccgatgagatcaccgtcagcagcgacttcgaggcacgccacgtgaagctgaacgtggaggagcgctccgtggggccgctcacccgcaaaggcttctacctggccttccaggatatcggtgcctgtgtggcgctgctctccgtccgtgtctactacaagaagtgccccgagctgctgcagggcctggcccacttccctgagaccatcgccggctctgatgcaccttccctggccactgtggccggcacctgtgtggaccatgccgtggtgccaccggggggtgaagagccccgtatgcactgtgcagtggatggcgagtggctggtgcccattgggcagtgcctgtgccaggcaggctacgagaaggtggaggatgcctgccaggcctgctcgcctggattttttaagtttgaggcatctgagagcccctgcttggagtgccctgagcacacgctgccatcccctgagggtgccacctcctgcgagtgtgaggaaggcttcttccgggcacctcaggacccagcgtcgatgccttgcacacgacccccttccgccccacactacctcacagccgtgggcatgggtgccaaggtggagctgcgctggacgccccctcaggacagcgggggccgcgaggacattgtctacagcgtcacctgcgaacagtgctggcccgagtctggggaatgcgggccgtgtgaggccagtgtgcgctactcggagcctcctcacggactgacccgcaccagtgtgacagtgagcgacctggagccccacatgaactacaccttcaccgtggaggcccgcaatggcgtctcaggcctggtaaccagccgcagcttccgtactgccagtgtcagcatcaaccagacagagccccccaaggtgaggctggagggccgcagcaccacctcgcttagcgtctcctggagcatccccccgccgcagcagagccgagtgtggaagtacgaggtcacttaccgcaagaagggagactccaacagctacaatgtgcgccgcaccgagggtttctccgtgaccctggacgacctggccccagacaccacctacctggtccaggtgcaggcactgacgcaggagggccagggggccggcagcaaggtgcacgaattccagacgctgtccccggagggatctggcaacttggcggtgattggcggcgtggctgtcggtgtggtcctgcttctggtgctggcaggagttggcttctttatccaccgcaggaggaagaaccagcgtgcccgccagtccccggaggacgtttacttctccaagtcagaacaactgaagcccctgaagacatacgtggacccccacacatatgaggaccccaaccaggctgtgttgaagttcactaccgagatccatccatcctgtgtcactcggcagaaggtgatcggagcaggagagtttggggaggtgtacaagggcatgctgaagacatcctcggggaagaaggaggtgccggtggccatcaagacgctgaaagccggctacacagagaagcagcgagtggacttcctcggcgaggccggcatcatgggccagttcagccaccacaacatcatccgcctagagggcgtcatctccaaatacaagcccatgatgatcatcactgagtacatggagaatggggccctggacaagttccttcgggagaaggatggcgagttcagcgtgctgcagctggtgggcatgctgcggggcatcgcagctggcatgaagtacctggccaacatgaactatgtgcaccgtgacctggctgcccgcaacatcctcgtcaacagcaacctggtctgcaaggtgtctgactttggcctgtcccgcgtgctggaggacgaccccgaggccacctacaccaccagtggcggcaagatccccatccgctggaccgccccggaggccatttcctaccggaagttcacctctgccagcgacgtgtggagctttggcattgtcatgtgggaggtgatgacctatggcgagcggccctactgggagttgtccaaccacgaggtgatgaaagccatcaatgatggcttccggctccccacacccatggactgcccctccgccatctaccagctcatgatgcagtgctggcagcaggagcgtgcccgccgccccaagttcgctgacatcgtcagcatcctggacaagctcattcgtgcccctgactccctcaagaccctggctgactttgacccccgcgtgtctatccggctccccagcacgagcggctcggagggggtgcccttccgcacggtgtccgagtggctggagtccatcaagatgcagcagtatacggagcacttcatggcggccggctacactgccatcgagaaggtggtgcagatgaccaacgacgacatcaagaggattggggtgcggctgcccggccaccagaagcgcatcgcctacagcctgctgggactcaaggaccaggtgaacactgtggggatccccatctgagcctcgacagggcctggagccccatcggccaagaatacttgaagaaacagagtggcctccctgctgtgccatgctgggccactggggactttatttatttctagttctttcctccccctgcaacttccgctgaggggtctcggatgacaccctggcctgaactgaggagatgaccagggatgctgggctgggccctctttccctgcgagacgcacacagctgagcacttagcaggcaccgccacgtcccagcatccctggagcaggagccccgccacagccttcggacagacatataggatattcccaagccgaccttccctccgccttctcccacatgaggccatctcaggagatggagggcttggcccagcgccaagtaaacagggtacctcaagccccatttcctcacactaagagggcagactgtgaacttgactgggtgagacccaaagcggtccctgtccctctagtgccttctttagaccctcgggccccatcctcatccctgactggccaaacccttgctttcctgggcctttgcaagatgcttggttgtgttgaggtttttaaatatatattttgtactttgtggagagaatgtgtgtgtgtggcagggggccccgccagggctggggacagagggtgtcaaacattcgtgagctggggactcagggaccggtgctgcaggagtgtcctgcccatgccccagtcggccccatctctcatccttttggataagtttctattctgtcagtgttaaagattttgttttgttggacatttttttcgaatcttaatttattattttttttatatttattgttagaaaatgacttatttctgctctggaataaagttgcagatgattcaaaccg

SEQ ID NO: 224 - DNA, 2902 bp, Homo sapiens; identical to SEQ ID NO: 85
  Homo sapiens ephrin-B2 (EFNB2), mRNA

SEQ ID NO: 225 - DNA, 2895 bp, Homo sapiens
  Homo sapiens ephrin-B1 (EFNB1), mRNA
cgggctcgatcgcccgggagccaggactcggcgacgcgaggctgccgggctacccggccgaggcttcgggggcgcaaactaatgggactggctcgctcggcagcatctccccgctcttctaagtacactgagcagggcccgcgctgaagtagaagctgtccgggggcgcgtagcccggagtcccagtgtggcccggaggaacggagcccgtgccagggcggcccagtcgggagcccggggaccgagcttgtgctgtggggaaacccccacttcttccaagggacagcgatcccgggacggtcgaggcgtcggggcggtcaccgagacctctgcgggaagaccccgtcggggagagggcgcgcagccccgaagcgtctcgggaagtcgagcggaatcgggcgggatcacccgggggcgcagagcccccgtcgcgcctcgtgcggcagcggagagcccaggagaacgagccctcgggggccgaagcccatgcccgggttgggggcggctgcccagtgagtcctcctggccggccgggcggagaagagcgacaccgaagccggcgggaggggagcacttcaaggccggcggctgcggaggatgggcgcctgagcggctccgagcgcagcgcggcagaggaaggcgaggcgagctttggtgaggaggcgccaagggatcccgaagtgcagtctgcccccgggaagatggctcggcctgggcagcgttggctcggcaagtggcttgtggcgatggtcgtgtgggcgctgtgccggctcgccacaccgctggccaagaacctggagcccgtatcctggagctccctcaaccccaagttcctgagtgggaagggcttggtgatctatccgaaaattggagacaagctggacatcatctgcccccgagcagaagcagggcggccctatgagtactacaagctgtacctggtgcggcctgagcaggcagctgcctgtagcacagttctcgaccccaacgtgttggtcacctgcaataggccagagcaggaaatacgctttaccatcaagttccaggagttcagccccaactacatgggcctggagttcaagaagcaccatgattactacattacctcaacatccaatggaagcctggaggggctggaaaaccgggagggcggtgtgtgccgcacacgcaccatgaagatcatcatgaaggttgggcaagatcccaatgctgtgacgcctgagcagctgactaccagcaggcccagcaaggaggcagacaacactgtcaagatggccacacaggcccctggtagtcggggctccctgggtgactctgatggcaagcatgagactgtgaaccaggaagagaagagtggcccaggtgcaagtgggggcagcagcggggaccctgatggcttcttcaactccaaggtggcattgttcgcggctgtcggtgccggttgcgtcatcttcctgctcatcatcatcttcctgacggtcctactactgaagctacgcaagcggcaccgcaagcacacacagcagcgggcggctgccctctcgctcagtaccctggccagtcccaaggggggcagtggcacagcgggcaccgagcccagcgacatcatcattcccttacggactacagagaacaactactgcccccactatgagaaggtgagtggggactacgggcaccctgtctacatcgtccaagagatgccgccccagagcccggcgaacatctactacaaggtctgagtgcccggcacggcctcaggccccagggacagtcggcctggaccggacctctcctttcgcccccacaccccctccccttgccagctgtgcccacctttgtatttagttttgtagtttcttggcttttataatccccctttttccctgccccctgggcttcggaggggggtgcttgtgcccctaacccccatgctcttgtgccttccccctctggccaggcctctgggctccgtgggggcgccccttcttggaaggcagggctggacactgatggacagcaggcagggagacagtcccctggtcctgcccctccctcgccccccttgccaccttcccaggactgcttgtccgctatcatcactgtttttaatgcttttgtgttcattttttagctgtcaactcattttcatctgttttttgaagaaaaatggaaaaatgtaaaaggcagcccctccccaggctttgtgagcctggcccaagccagtacaagagggcctggggcacgatgtggtcagccaggaagcataggatgccatttcttttatagattccttggtatttctggtggggtaaggggcaggccagggctgttcacgcccatgagggaagaggaaagtgccactgggcaaggtgtcccaccctcccctcctgaccctcctacgaggcttatcctggcaatggggtagtcactgccacccttccacacacacacacacacacacacacacacacacaaaaatcccttccttgtgggattcttgggcatctcctgcctccctcactctcacggtaattaatgtcttaattggctgttgcctggggaacaggagagctgctgcaggcagatgacctcatggggggtggagggaggtgaggtgcccaggtgtctatttaccctgcagagctgggagtttcaccccaccccccaccctgttctctccttacctttggcatcctttggcctggtggggaaacagaggcccagggtggagacctaagcgggtataagaccaggtggcctgctccttttctgggccctagcacaggtgggtaacccccacccaacccagctcctgctgctgtcccagtcttgggctgggccctggaaagaggaagagcctgcctgggagcaggtcgtctcgttccaagatct

SEQ ID NO: 226 - DNA, 1480 bp, Homo sapiens
  Homo sapiens ephrin-A1 (EFNA1), mRNA
gcggagaaagccagtgggaacccagacccataggagacccgcgtccccgctcggcctggccaggccccgcgctatggagttcctctgggcccctctcttgggtctgtgctgcagtctggccgctgctgatcgccacaccgtcttctggaacagttcaaatcccaagttccggaatgaggactacaccatacatgtgcagctgaatgactacgtggacatcatctgtccgcactatgaagatcactctgtggcagacgctgccatggagcagtacatactgtacctggtggagcatgaggagtaccagctgtgccagccccagtccaaggaccaagtccgctggcagtgcaaccggcccagtgccaagcatggcccggagaagctgtctgagaagttccagcgcttcacacctttcaccctgggcaaggagttcaaagaaggacacagctactactacatctccaaacccatccaccagcatgaagaccgctgcttgaggttgaaggtgactgtcagtggcaaaatcactcacagtcctcaggcccatgtcaatccacaggagaagagacttgcagcagatgacccagaggtgcgggttctacatagcatcggtcacagtgctgccccacgcctcttcccacttgcctggactgtgctgctccttccacttctgctgctgcaaaccccgtgaaggtgtatgccacacctggccttaaagagggacaggctgaagagagggacaggcactccaaacctgtcttggggccactttcagagcccccagccctgggaaccactcccaccacaggcataagctatcacctagcagcctcaaaacgggtcagtattaaggttttcaaccggaaggaggccaaccagcccgacagtgccatccccaccttcacctcggagggacggagaaagaagtggagacagtcctttcccaccattcctgcctttaagccaaagaaacaagctgtgcaggcatggtcccttaaggcacagtgggagctgagctggaaggggccacgtggatgggcaaagcttgtcaaagatgccccctccaggagagagccaggatgcccagatgaactgactgaaggaaaagcaagaaacagtttcttgcttggaagccaggtacaggagaggcagcatgcttgggctgacccagcatctcccagcaagacctcatctgtggagctgccacagagaagtttgtagccaggtactgcattctctcccatcctggggcagcactccccagagctgtgccagcaggggggctgtgccaacctgttcttagagtgtagctgtaagggcagtgcccatgtgtacattctgcctagagtgtagcctaaagggcagggcccacgtgtatagtatctgtatataagttgctgtgtgtctgtcctgatttctacaactggagtttttttatacaatgttctttgtctcaaaataaagcaatgtgttttttcgg

SEQ ID NO: 227 - DNA, 3394 bp, Homo sapiens
  Homo sapiens ephrin-B3 (EFNB3), mRNA
gaattccgacttgttttgtggtctaacatatggtctatgctgcagaatggtccatgtgctgatgagaagaatgtatattctgcagctgttggaagaaagggtctgtaaatgtctgttaggtccatttggtctataatgcagattaagtctgatgtttctttctagatgatctgcccaatactgaaagtgaggcattaaaatcccctgcctttttttgtattaggatctgcctctctctttagctctaatagtgtttgtttatacatgtgagtactttggtattgggtgcatatatatttaaaattgttacatccttttgctgaattgatccctttttcattatgtaatgatcttctttgtccctttttatgttttctgacttagtctattatgaataagtggcgcctgcagacggcccctggaagggctctggtggggctgagcgctctgccgcgggggcgcgggcacagcaggaagcaggtccgcgtgggcgctgggggcatcagctaccggggtggtccgggctgaagagccaggcagccaaggcagccaccccggggggtgggcgactttgggggagttggtgccccgccccccaggccttggcggggtcatggggcccccccattctgggccggggggcgtgcgagtcggggccctgctgctgctgggggttttggggctggtgtctgggctcagcctggagcctgtctactggaactcggcgaataagaggttccaggcagagggtggttatgtgctgtaccctcagatcggggaccggctagacctgctctgcccccgggcccggcctcctggccctcactcctctcctaattatgagttctacaagctgtacctggtagggggtgctcagggccggcgctgtgaggcaccccctgccccaaacctccttctcacttgtgatcgcccagacctggatctccgcttcaccatcaagttccaggagtatagccctaatctctggggccacgagttccgctcgcaccacgattactacatcattgccacatcggatgggacccgggagggcctggagagcctgcagggaggtgtgtgcctaaccagaggcatgaaggtgcttctccgagtgggacaaagtccccgaggaggggctgtcccccgaaaacctgtgtctgaaatgcccatggaaagagaccgaggggcagcccacagcctggagcctgggaaggagaacctgccaggtgaccccaccagcaatgcaacctcccggggtgctgaaggccccctgccccctcccagcatgcctgcagtggctggggcagcaggggggctggcgctgctcttgctgggcgtggcaggggctgggggtgccatgtgttggcggagacggcgggccaagccttcggagagtcgccaccctggtcctggctccttcgggaggggagggtctctgggcctggggggtggaggtgggatgggacctcgggaggctgagcctggggagctagggatagctctgcggggtggcggggctgcagatccccccttctgcccccactatgagaaggtgagtggtgactatgggcatcctgtgtatatcgtgcaggatgggcccccccagagccctccaaacatctactacaaggtatgagggctcctctcacgtggctatcctgaatccagcccttcttggggtgctcctccagtttaattcctggtttgagggacacctctaacatctcggccccctgtgcccccccagccccttcactcctcccggctgctgtcctcgtctccacttttaggattccttaggattcccactgccccacttcctgccctcccgtttggccatgggtgcccccctctgtctcagtgtccctggatcctttttccttggggaggggcacaggctcagcctcctctctgaccatgacccaggcatccttgtccccctcacccacccagagctaggggcgggaacagcccaccttttggttggcaccgccttctttctgcctctcactggttttctcttctctatctcttattctttccctctcttccgtctctaggtctgttcttcttccctagcatcctcctccccacatctcctttcaccctcttggcttcttatcctgtgcctctcccatctcctgggtgggggcatcaaagcatttctccccttagctttcagccccccttctgacctctcataccaaccactcccctcagtctgccaaaaatgggggccttatggggaaggctctgacactccaccccagctcaggccatgggcagcagggctccattctctggcctggcccaggcctctacatacttactccagccatttggggtggttgggtcatgacagctaccatgagaagaagtgtcccgttttgtccagtggccaatagcaagatatgaaccggtcgggacatgtatggacttggtctgatgctgaatgggccacttgggaccggaagtgacttgctccagacaagaggtgaccaggcccggacagaaatggcctgggaagtagcagaagcagtgcagcaggaactggaagtgccttcatccaggacaggaagtagcacttctgaaacaggaagtggtctggctggaactccaagtggcttagtctgggggatcaggaggtgggaggtggatggttcttattctgtggagaagaagggcgggaagaacttcctttcaggaggaagctggaacttactgactgtaagaggttagaggtggaccgagaaggacttttcccagtcttcagtggcacttcccaagatctcccttcccttgtgctctgtgctgattttaggacagctaagatgactgccatgtgctgtggcaggcctaatttgtcttgttctttcctttccatatcccagtataatctctgttaatcaacaggactaccccaagaacccatgtgctctcccgagtaacccagatggctgtcttgttcattccatcctacatttctgactcctttcagactcaacacagttcccttcttagtgaccaaaatggtggcctactggctggtctagctgacagtggtacttagcaaaggccactgtttccatagtgaccagctgatacctcttcctgccctctagtgtgcaattgggtgttgcctcagtttcctcccagctcagttttattagatcaaagctgttgttgggcaccaggttggccacctcaatcaccagccaagatggttgctttgtccaccagaggtcaagttcacctctctggtgctgtagttcccagctccttcctgatttttctaatcgctccttctggggaacaggaagttgatattgccatggtggcggggtatgccgtcacctcagtagttttactgtaaaagggaaatttgaaggaattc

SEQ ID NO: 228 - DNA, 1574 bp, Homo sapiens
  Homo sapiens ephrin-A5 (EFNA5), mRNA
gcttctctccatcttgtgattcctttttcctcctgaaccctccagtgggggtgcgagtttgtctttatcaccccccatcccaccgccttcttttcttctcgctctcctacccctccccagcttggtgggcgcctctttcctttctcgccccctttcatttttatttattcatatttatttggcgcccgctctctctctgtccctttgcctgcctccctccctccggatccccgctctctccccggagtggcgcgtcgggggctccgccgctggccaggcgtgatgttgcacgtggagatgttgacgctggtgtttctggtgctctggatgtgtgtgttcagccaggacccgggctccaaggccgtcgccgaccgctacgctgtctactggaacagcagcaaccccagattccagaggggtgactaccatattgatgtctgtatcaatgactacctggatgttttctgccctcactatgaggactccgtcccagaagataagactgagcgctatgtcctctacatggtgaactttgatggctacagtgcctgcgaccacacttccaaagggttcaagagatgggaatgtaaccggcctcactctccaaatggaccgctgaagttctctgaaaaattccagctcttcactcccttttctctaggatttgaattcaggccaggccgagaatatttctacatctcctctgcaatcccagataatggaagaaggtcctgtctaaagctcaaagtctttgtgagaccaacaaatagctgtatgaaaactataggtgttcatgatcgtgttttcgatgttaacgacaaagtagaaaattcattagaaccagcagatgacaccgtacatgagtcagccgagccatcccgcggcgagaacgcggcacaaacaccaaggatacccagccgccttttggcaatcctactgttcctcctggcgatgcttttgacattatagcacagtctcctcccatcacttgtcacagaaaacatcagggtcttggaacaccagagatccacctaactgctcatcctaagaagggacttgttattgggttttggcagatgtcagatttttgttttctttctttcagcctgaattctaagcaacaacttcaggttgggggcctaaacttgttcctgcctccctcaccccaccccgccccacccccagccctggcccttggcttctctcacccctcccaaattaaatggactccagatgaaaatgccaaattgtcatagtgacaccagtggttcgtcagctcctgtgcattctcctctaagaactcacctccgttagcgcactgtgtcagcgggctatggacaaggaagaatagtggcagatgcagccagcgctggctagggctgggagggttttgctctcctatgcaatatttatgccttctcattcagaactgtaagatgatcgcgcagggcatcatgtcaccatgtcaggtccggaggggaggtattaagaatagatacgatattacaccatttcctataggagtatgtaaatgaacaggcttctaaaaggttgagacactggttttttttttt

SEQ ID NO: 229 - DNA, 1066 bp, Homo sapiens
  Homo sapiens ephrin-A2 (EFNA2), mRNA
ggccggaccggggccatggcgcccgcgcaggccccgctgctcccgctgctgctcctgctgttaccgctgccgccgccgcccttcgcgccccccgaggaccgccgccgcgccaactcggaccgctacgccgtctactggaaccgcagcaaccccaggttccacgcaggcgcgggggacgacggcgggggctacacggtggaggtgagcatcaatgactacctggacatctactgcccgcactatggggcgccgctgccgccggccgagcgcatggagcactacgtgctgtacatggtcaacggcgagggccacgcctcctgcgaccaccgccagcgcggcttcaagcgctgggagtgcaaccggcccgcggcgcccggggggccgctcaagttctcggagaagttccagctcttcacgcccttctccctgggcttcgagttccggcccggccacgagtattactacatctctgccacgcctcccaatgctgtggaccggccctgcctgcgactgaaggtgtacgtgcggccgaccaacgagaccctgtacgaggctcctgagcccatcttcaccagcaataactcgtgtagcagcccgggtggctgccgcctcttcctcagcaccatccccgtgctctggaccctcctgggttcctagtcccagccccgcaggacgccgaccctgcctggacggccccgcctggaccgcctgacctcggccctccggacccggctgcggcccccgcctccgagaccaaatagagacgctgcttctccctcgccaggagccgcccccgccgggcaggggccatccacccgccccaggaccagccctcagggaggggaaacggccgagagcccccccccggagcccgaggggccggggtgtggatgcggaccgtggccaggccatctcctctggggcgtcggagaacccgggcccgcgggccggttgcactcccagcgcttgaagcgggctggcggtggtcgcaggaggcgtggccctcgccgttgaccatgtacagcacgtagtgctccatgcgctcggccggcggcagcggcgcccc

SEQ ID NO: 230 - DNA, 2461 bp, Homo sapiens; identical to SEQ ID NO: 158
  Homo sapiens growth arrest-specific 6 (GAS6), mRNA.

SEQ ID NO: 231 - DNA, 4986 bp, Homo sapiens
  Homo sapiens AXL receptor tyrosine kinase (AXL), transcript variant 2, mRNA
gagtggagttctggaggaatgtttaccagacacagagcccagagggacagcgcccagagcccagatagagagacacggcctcactggctcagcaccagggtccccttccccctcctcagctccctccctggcccctttaagaaagagctgatcctctcctctcttgagttaacccctgattgtccaggtggcccctggctctggcctggtgggcggaggcaaagggggagccaggggcggagaaagggttgcccaagtctgggagtgagggaaggaggcaggggtgctgagaaggcggctgctgggcaaagccggtggcaagggcctcccctgccgctgtgccaggcaggcagtgccaaatccggggagcctggagctggggggagggccggggacagcccggccctgccccctcccccgctgggagcccagcaacttctgaggaaagtttggcacccatggcgtggcggtgccccaggatgggcagggtcccgctggcctggtgcttggcgctgtgcggctgggcgtgcatggcccccaggggcacgcaggctgaagaaagtcccttcgtgggcaacccagggaatatcacaggtgcccggggactcacgggcacccttcggtgtcagctccaggttcagggagagccccccgaggtacattggcttcgggatggacagatcctggagctcgcggacagcacccagacccaggtgcccctgggtgaggatgaacaggatgactggatagtggtcagccagctcagaatcacctccctgcagctttccgacacgggacagtaccagtgtttggtgtttctgggacatcagaccttcgtgtcccagcctggctatgttgggctggagggcttgccttacttcctggaggagcccgaagacaggactgtggccgccaacacccccttcaacctgagctgccaagctcagggacccccagagcccgtggacctactctggctccaggatgctgtccccctggccacggctccaggtcacggcccccagcgcagcctgcatgttccagggctgaacaagacatcctctttctcctgcgaagcccataacgccaagggggtcaccacatcccgcacagccaccatcacagtgctcccccagcagccccgtaacctccacctggtctcccgccaacccacggagctggaggtggcttggactccaggcctgagcggcatctaccccctgacccactgcaccctgcaggctgtgctgtcagacgatgggatgggcatccaggcgggagaaccagaccccccagaggagcccctcacctcgcaagcatccgtgcccccccatcagcttcggctaggcagcctccatcctcacaccccttatcacatccgcgtggcatgcaccagcagccagggcccctcatcctggacccactggcttcctgtggagacgccggagggagtgcccctgggcccccctaagaacattagtgctacgcggaatgggagccaggccttcgtgcattggcaagagccccgggcgcccctgcagggtaccctgttagggtaccggctggcgtatcaaggccaggacaccccagaggtgctaatggacatagggctaaggcaagaggtgaccctggagctgcagggggacgggtctgtgtccaatctgacagtgtgtgtggcagcctacactgctgctggggatggaccctggagcctcccagtacccctggaggcctggcgcccagtgaaggaaccttcaactcctgccttctcgtggccctggtggtatgtactgctaggagcagtcgtggccgctgcctgtgtcctcatcttggctctcttccttgtccaccggcgaaagaaggagacccgttatggagaagtgtttgaaccaacagtggaaagaggtgaactggtagtcaggtaccgcgtgcgcaagtcctacagtcgtcggaccactgaagctaccttgaacagcctgggcatcagtgaagagctgaaggagaagctgcgggatgtgatggtggaccggcacaaggtggccctggggaagactctgggagagggagagtttggagctgtgatggaaggccagctcaaccaggacgactccatcctcaaggtggctgtgaagacgatgaagattgccatctgcacgaggtcagagctggaggatttcctgagtgaagcggtctgcatgaaggaatttgaccatcccaacgtcatgaggctcatcggtgtctgtttccagggttctgaacgagagagcttcccagcacctgtggtcatcttacctttcatgaaacatggagacctacacagcttcctcctctattcccggctcggggaccagccagtgtacctgcccactcagatgctagtgaagttcatggcagacatcgccagtggcatggagtatctgagtaccaagagattcatacaccgggacctggcggccaggaactgcatgctgaatgagaacatgtccgtgtgtgtggcggacttcgggctctccaagaagatctacaatggggactactaccgccagggacgtatcgccaagatgccagtcaagtggattgccattgagagtctagctgaccgtgtctacaccagcaagagcgatgtgtggtccttcggggtgacaatgtgggagattgccacaagaggccaaaccccatatccgggcgtggagaacagcgagatttatgactatctgcgccagggaaatcgcctgaagcagcctgcggactgtctggatggactgtatgccttgatgtcgcggtgctgggagctaaatccccaggaccggccaagttttacagagctgcgggaagatttggagaacacactgaaggccttgcctcctgcccaggagcctgacgaaatcctctatgtcaacatggatgagggtggaggttatcctgaaccccctggagctgcaggaggagctgaccccccaacccagccagaccctaaggattcctgtagctgcctcactgcggctgaggtccatcctgctggacgctatgtcctctgcccttccacaacccctagccccgctcagcctgctgataggggctccccagcagccccagggcaggaggatggtgcctgagacaaccctccacctggtactccctctcaggatccaagctaagcactgccactggggaaaactccaccttcccacttttccaccccacgccttatccccacttgcagccctgtcttcctacctatcccacctccatcccagacaggtccctccccttctctgtgcagtagcatcaccttgaaagcagtagcatcaccatctgtaaaaggaaggggttggattgcaatatctgaagccctcccaggtgttaacattccaagactctagagtccaaggtttaaagagtctagattcaaaggttctaggtttcaaagatgctgtgagtctttggttctaaggacctgaaattccaaagtctctaattctattaaagtgctaaggttctaaggcctacttttttttttttttttttttttttttttttttttgcgatagagtctcactgtgtcacccaggctggagtgcagtggtgcaatctcgcctcactgcaaccttcacctaccgagttcaagtgattttcctgccttggcctcccaagtagctgggattacaggtgtgtgccaccacacccggctaatttttatatttttagtagagacagggtttcaccatgttggccaggctggtctaaaactcctgacctcaagtgatctgcccacctcagcctcccaaagtgctgagattacaggcatgagccactgcactcaaccttaagacctactgttctaaagctctgacattatgtggttttagattttctggttctaacatttttgataaagcctcaaggttttaggttctaaagttctaagattctgattttaggagctaaggctctatgagtctagatgtttattcttctagagttcagagtccttaaaatgtaagattatagattctaaagattctatagttctagacatggaggttctaaggcctaggattctaaaatgtgatgttctaaggctctgagagtctagattctctggctgtaaggctctagatcataaggcttcaaaatgttatcttctcaagttctaagattctaatgatgatcaattatagtttctgaggctttatgataatagattctcttgtataagatcctagatcctaagggtcgaaagctctagaatctgcaattcaaaagttccaagagtctaaagatggagtttctaaggtccggtgttctaagatgtgatattctaagacttactctaagatcttagattctctgtgtctaagattctagatcagatgctccaagattctagatgattaaataagattctaacggtctgttctgtttcaaggcactctagattccattggtccaagattccggatcctaagcatctaagttataagactctcacactcagttgtgactaactagacaccaaagttctaataatttctaatgttggacacctttaggttctttgctssattctgcctctctaggaccatggttaagagtccaagaatccacatttctaaaatcttatagttctaggcactgtagttctaagactcaaatgttctaagtttctaagattctaaaggtccacaggtctagactattaggtgcaatttcaaggttctaaccctatactgtagtattctttggggtgcccctctccttcttagctatcattgcttcctcctccccaactgtgggggtgtgcccccttcaagcctgtgcaatgcattagggatgcctcctttccgcaggggatggacgatctcccacctttcgggccatgttgcccccgtgagccaatccctcaccttctgagtacagagtgtggactctggtgcctccagaggggctcaggtcacataaaactttgtatatcaacgaaaaaaa

SEQ ID NO: 232 - DNA, 5015 bp, Homo sapiens
  Homo sapiens AXL receptor tyrosine kinase (AXL), transcript variant 1, mRNA
gagtggagttctggaggaatgtttaccagacacagagcccagagggacagcgcccagagcccagatagagagacacggcctcactggctcagcaccagggtccccttccccctcctcagctccctccctggcccctttaagaaagagctgatcctctcctctcttgagttaacccctgattgtccaggtggcccctggctctggcctggtgggcggaggcaaagggggagccaggggcggagaaagggttgcccaagtctgggagtgagggaaggaggcaggggtgctgagaaggcggctgctgggcagagccggtggcaagggcctcccctgccgctgtgccaggcaggcagtgccaaatccggggagcctggagctggggggagggccggggacagcccggcccgctgccccctcccccgctgggagcccagcaacttctgaggaaagtttggcacccatggcgtggcggtgccccaggatgggcagggtcccgctggcctggtgcttggcgctgtgcggctgggcgtgcatggcccccaggggcacgcaggctgaagaaagtcccttcgtgggcaacccagggaatatcacaggtgcccggggactcacgggcacccttcggtgtcagctccaggttcagggagagccccccgaggtacattggcttcgggatggacagatcctggagctcgcggacagcacccagacccaggtgcccctgggtgaggatgaacaggatgactggatagtggtcagccagctcagaatcacctccctgcagctttccgacacgggacagtaccagtgtttggtgtttctgggacatcagaccttcgtgtcccagcctggctatgttgggctggagggcttgccttacttcctggaggagcccgaagacaggactgtggccgccaacacccccttcaacctgagctgccaagctcagggacccccagagcccgtggacctactctggctccaggatgctgtccccctggccacggctccaggtcacggcccccagcgcagcctgcatgttccagggctgaacaagacatcctctttctcctgcgaagcccataacgccaagggggtcaccacatcccgcacagccaccatcacagtgctcccccagcagccccgtaacctccacctggtctcccgccaacccacggagctggaggtggcttggactccaggcctgagcggcatctaccccctgacccactgcaccctgcaggctgtgctgtcagacgatgggatgggcatccaggcgggagaaccagaccccccagaggagcccctcacctcgcaagcatccgtgcccccccatcagcttcggctaggcagcctccatcctcaccccccttatcacatccgcgtggcatgcaccagcagccagggcccctcatcctggacccactggcttcctgtggagacgccggagggagtgcccctgggcccccctgagaacattagtgctacgcggaatgggagccaggccttcgtgcattggcaagagccccgggcgcccctgcagggtaccctgttagggtaccggctggcgtatcaaggccaggacaccccagaggtgctaatggacatagggctaaggcaagaggtgaccctggagctgcagggggacgggtctgtgtccaatctgacagtgtgtgtggcagcctacactgctgctggggatggaccctggagcctcccagtacccctggaggcctggcgcccaggggaagcacagccagtccaccagctggtgaaggaaccttcaactcctgccttctcgtggccctggtggtatgtactgctaggagcagtcgtggccgctgcctgtgtcctcatcttggctctcttccttgtccaccggcgaaagaaggagacccgttatggagaagtgtttgaaccaacagtggaaagaggtgaactggtagtcaggtaccgcgtgcgcaagtcctacagtcgtcggaccactgaagctaccttgaacagcctgggcatcagtgaagagctgaaggagaagctgcgggatgtgatggtggaccggcacaaggtggccctggggaagactctgggagagggagagtttggagctgtgatggaaggccagctcaaccaggacgactccatcctcaaggtggctgtgaagacgatgaagattgccatctgcacgaggtcagagctggaggatttcctgagtgaagcggtctgcatgaaggaatttgaccatcccaacgtcatgaggctcatcggtgtctgtttccagggttctgaacgagagagcttcccagcacctgtggtcatcttacctttcatgaaacatggagacctacacagcttcctcctctattcccggctcgggggccagccagtgtacctgcccactcagatgctagtgaagttcatggcagacatcgccagtggcatggagtatctgagtaccaagagattcatacaccgggacctggcggccaggaactgcatgctgaatgagaacatgtccgtgtgtgtggcggacttcgggctctccaagaagatctacaatggggactactaccgccagggacgtatcgccaagatgccagtcaagtggattgccattgagagtctagctgaccgtgtctacaccagcaagagcgatgtgtggtccttcggggtgacaatgtgggagattgccacaagaggccaaaccccatatccgggcgtggagaacagcgagatttatgactatctgcgccagggaaatcgcctgaagcagcctgcggactgtctggatggactgtatgccttgatgtcgcggtgctgggagctaaatccccaggaccggccaagttttacagagctgcgggaagatttggagaacacactgaaggccttgcctcctgcccaggagcctgacgaaatcctctatgtcaacatggatgagggtggaggttatcctgaaccccctggagctgcaggaggagctgaccccccaacccagccagaccctaaggattcctgtagctgcctcactgcggctgaggtccatcctgctggacgctatgtcctctgcccttccacaacccctagccccgctcagcctgctgataggggctccccagcagccccagggcaggaggatggtgcctgagacaaccctccacctggtactccctctcaggatccaagctaagcactgccactgggggaaactccaccttcccactttcccaccccacgccttatccccacttgcagccctgtcttcctacctatcccacctccatcccagacaggtccctggccttctctgtgcagtagcatcaccttgaaagcagtagcatcaccatctgtaaaaggaaggggttggattgcaatatctgaagccctcccaggtgttaacattccaagactctagagtccaaggtttaaagagtctagattcaaaggttctaggtttcaaagatgctgtgagtctttggttctaaggacctgaaattccaaagtctctaattctattaaagtgctaaggttctaaggcctacttttttttttttttttttttttttttttttttttgcgatagagtctcactgtgtcacccaggctggagtgcagtggtgcaatctcgcctcactgcaaccttcacctaccgagttcaagtgattttcctgccttggcctcccaagtagctgggattacaggtgtgtgccaccacacccggctaatttttatatttttagtagagacagggtttcaccatgttggccaggctggtctaaaactcctgacctcaagtgatctgcccacctcagcctcccaaagtgctgagattacaggcatgagccactgcactcaaccttaagacctactgttctaaagctctgacattatgtggttttagattttctggttctaacatttttgataaagcctcaaggttttaggttctaaagttctaagattctgattttaggagctaaggctctatgagtctagatgtttattcttctagagttcagagtccttaaaatgtaagattatagattctaaagattctatagttctagacatggaggttctaaggcctaggattctaaaatgtgatgttctaaggctctgagagtctagattctctggctgtaaggctctagatcataaggcttcaaaatgttatcttctcaagttctaagattctaatgatgatcaattatagtttctgaggctttatgataatagattctcttgtataagatcctagatcctaagggtcgaaagctctagaatctgcaattcaaaagttccaagagtctaaagatggagtttctaaggtccggtgttctaagatgtgatattctaagacttactctaagatcttagattctctgtgtctaagattctagatcagatgctccaagattctagatgattaaataagattctaacggtctgttctgtttcaaggcactctagattccattggtccaagattccggatcctaagcatctaagttataagactctcacactcagttgtgactaactagacaccaaagttctaataatttctaatgttggacacctttaggttctttgctssattctgcctctctaggaccatggttaagagtccaagaatccacatttctaaaatcttatagttctaggcactgtagttctaagactcaaatgttctaagtttctaagattctaaaggtccacaggtctagactattaggtgcaatttcaaggttctaaccctatactgtagtattctttggggtgcccctctccttcttagctatcattgcttcctcctccccaactgtgggggtgtgcccccttcaagcctgtgcaatgcattagggatgcctcctttccgcaggggatggacgatctcccacctttcgggccatgttgcccccgtgagccaatccctcaccttctgagtacagagtgtggactctggtgcctccagaggggctcaggtcacataaaactttgtatatcaacgaaaaaaa

SEQ ID NO: 233 - DNA, 4364 bp, Homo sapiens; identical to SEQ ID NO: 172
  Homo sapiens TYRO3 protein tyrosine kinase (TYRO3), mRNA

SEQ ID NO: 234 - DNA, 3608 bp, Homo sapiens
  Homo sapiens c-mer proto-oncogene tyrosine kinase (MERTK), mRNA
gaattcgtgtctcggcactcactcccggccgcccggacagggagctttcgctggcgcgcttggccggcgacaggacaggttcgggacgtccatctgtccatccgtccggagagaaattacagatccgcagccccgggatggggccggccccgctgccgctgctgctgggcctcttcctccccgcgctctggcgtagagctatcactgaggcaagggaagaagccaagccttacccgctattcccgggaccttttccagggagcctgcaaactgaccacacaccgctgttatcccttcctcacgccagtgggtaccagcctgccttgatgttttcaccaacccagcctggaagaccacatacaggaaacgtagccattccccaggtgacctctgtcgaatcaaagcccctaccgcctcttgccttcaaacacacagttggacacataatactttctgaacataaaggtgtcaaatttaattgctcaatcaatgtacctaatatataccaggacaccacaatttcttggtggaaagatgggaaggaattgcttgggggacatcatcgaattacacagttttatccagatgatgaagttacagcaataatcgcttccttcagcataaccagtgtgcagcgttcagacaatgggtcgtatatctgtaagatgaaaataaacaatgaagagatcgtgtctgatcccatctacatcgaagtacaaggacttcctcactttactaagcagcctgagagcatgaatgtcaccagaaacacagccttcaacctcacctgtcaggctgtgggcccgcctgagcccgtcaacattttctgggttcaaaacagtagccgtgttaacgaacagcctgaaaaatcccccggcgtgctaactgttccaggcctgacggagatggcggtcttcagttgtgaggcccacaatgacaaagggctgaccgtgtcccagggagtgcagatcaacatcaaagcaattccctccccaccaactgaagtcagcatccgtaacagcactgcacacagcattctgatctcctgggttcctggttttgatggatactccccgttcaggaattgcagcattcaggtcaaggaagctgatccgctgggtaatggctcagtcatgatttttaacacctctgccttaccacatctgtaccaaatcaagcagctgcaagccctggctaattacagcattggtgtttcctgcatgaatgaaataggctggtctgcagtgagcccttggattctagcaagcacgactgaaggagccccatcagtagcacctttaaatgtcactgtgtttctgaatgaatctagtgataatgtggacatcagatggatgaagcctccgactaagcagcaggatggagaactggtgggctaccggatatcccacgtgtggcagagtgcagggatttccaaagagctcttggaggaagttggccagaatggcagccgagctcggatctctgttcaagtccacaatgctacgtgcacagtgaggattgcagccgtcaccagagggggagttgggcccttcagtgatccagtgaaaatatttatccctgcacacggttgggtagattatgccccctcttcaactccggcgcctggcaacgcagatcctgtgctcatcatctttggctgcttttgtggatttattttgattgggttgattttatacatctccttggccatcagaaaaagagtccaggagacaaagtttgggaatgcattcacagaggaggattctgaattagtggtgaattatatagcaaagaaatccttctgtcggcgagccattgaacttaccttacatagcttgggagtcagtgaggaactacaaaataaactagaagatgttgtgattgacaggaatcttctaattcttggaaaaattctgggtgaaggagagtttgggtctgtaatggaaggaaatcttaagcaggaagatgggacctctctgaaagtggcagtgaagaccatgaagttggacaactcttcacatcgggagatcgaggagtttctcagtgaggcagcgtgcatgaaagacttcagccacccaaatgtcattcgacttctaggtgtgtgtatagaaatgagctctcaaggcatcccaaagcccatggtaattttacccttcatgaaatacggggacctgcatacttacttactttattcccgattggagacaggaccaaagcatattcctctgcagacactattgaagttcatggtggatattgccctgggaatggagtatctgagcaacaggaattttcttcatcgagatttagctgctcgaaactgcatgttgcgagatgacatgactgtctgtgttgcggacttcggcctctctaagaagatttacagtggcgattattaccgccaaggccgcattgctaagatgcctgttaaatggatcgccatagaaagtcttgcagaccgagtctacacaagtaaaagtgatgtgtgggcatttggcgtgaccatgtgggaaatacgtacgcggggaatgactccctatcctggggtccagaaccatgagatgtatgactatcttctccatggccacaggttgaagcagcccgaagactgcctggatgaactgtatgaaataatgtactcttgctggagaaccgatcccttagaccgccccaccttttcagtattgaggctgcagctagaaaaactcttagaaagtttgcctgacgttcggaaccaagcagacgttatttacgtcaatacacagttgctggagagctctgagggcctggcccagggccccacccttgctccactggacttgaacatcgaccctgactctataattgcctcctgcactccccgcgctgccatcagtgtggtcacagcagaagttcatgacagcaaacctcatgaaggacggtacatcctgaatgggggcagtgaggaatgggaagatctgacttctgccccctctgctgcagtcacagctgaaaagaacagtgttttaccgggggagagacttgttaggaatggggtctcctggtcccattcgagcatgctgcccttgggaagctcattgcccgatgaacttttgtttgctgacgactcctcagaaggctcagaagtcctgatgtgaggagaggtgcggggagacattccaaaaatcaagccaattcttctgctgtaggagaatccaattgtacctgatgtttttggtatttgtcttccttaccaagtgaactccatggccccaaagcaccagatgaatgttgttaaggaagctgtcattaaaaatacataatatatatttatttaaagagaaaaaatatgtgtatatcatgaaaaagacaaggatattttaataaaacattacttatttcatttcacttatcttgcatatcttaaaattaagcttcagctgctccttgatattaacctttgtacagagttgaagttgttttttcaacttcttttctttttcattactattaaatgtaaaaatatttgtaaaatgaaatgccatatttgacttggcttctggtcttgatgtatttgataagaatgattaattttctgatatggcttccataataaaattgaaatagga

SEQ ID NO: 235 - DNA, 1035 bp, Homo sapiens
  Homo sapiens WNT1 inducible signaling pathway protein 1 (WISP1), transcript variant 2, mRNA.
ctgggcccagctcccccgagaggtggtcggatcctctgggctgctcggtcgatgcctgtgccactgacgtccaggcatgaggtggttcctgccctggacgctggcagcagtgacagcagcagccgccagcaccgtcctggccacggccctctctccagcccctacgaccatggactttaccccagctccactggaggacacctcctcacgcccccaattctgcaagtggccatgtgagtgcccgccatccccaccccgctgcccgctgggggtcagcctcatcacagatggctgtgagtgctgtaagatgtgcgctcagcagcttggggacaactgcacggaggctgccatctgtgacccccaccggggcctctactgtgactacagcggggaccgcccgaggtacgcaataggagtgtgtgcacatgctgtgggtgaggtggaggcatggcacaggaactgcatagcctacacaagcccctggagcccttgctccaccagctgcggcctgggggtctccactcggatctccaatgttaacgcccagtgctggcctgagcaagagagccgcctctgcaacttgcggccatgcgatgtggacatccatacactcattaaggcagggaagaagtgtctggctgtgtaccagccagaggcatccatgaacttcacacttgcgggctgcatcagcacacgctcctatcaacccaagtactgtggagtttgcatggacaataggtgctgcatcccctacaagtctaagactatcgacgtgtccttccagtgtcctgatgggcttggcttctcccgccaggtcctatggattaatgcctgcttctgtaacctgagctgtaggaatcccaatgacatctttgctgacttggaatcctaccctgacttctcagaaattgccaactaggcaggcacaaatcttgggtcttggggactaacccaatgcctgtgaagcagtcagcccttatggccaataacttttcaccaatgagccttagttaccctgaaaaaaaaaaaaaaaaa

SEQ ID NO: 236 - DNA, 2819 bp, Homo sapiens
  Homo sapiens WNT1 inducible signaling pathway protein 1 (WISP1), transcript variant 1, mRNA.
ctgggcccagctcccccgagaggtggtcggatcctctgggctgctcggtcgatgcctgtgccactgacgtccaggcatgaggtggttcctgccctggacgctggcagcagtgacagcagcagccgccagcaccgtcctggccacggccctctctccagcccctacgaccatggactttaccccagctccactggaggacacctcctcacgcccccaattctgcaagtggccatgtgagtgcccgccatccccaccccgctgcccgctgggggtcagcctcatcacagatggctgtgagtgctgtaagatgtgcgctcagcagcttggggacaactgcacggaggctgccatctgtgacccccaccggggcctctactgtgactacagcggggaccgcccgaggtacgcaataggagtgtgtgcacaggtggtcggtgtgggctgcgtcctggatggggtgcgctacaacaacggccagtccttccagcctaactgcaagtacaactgcacgtgcatcgacggcgcggtgggctgcacaccactgtgcctccgagtgcgccccccgcgtctctggtgcccccacccgcggcgcgtgagcatacctggccactgctgtgagcagtgggtatgtgaggacgacgccaagaggccacgcaagaccgcaccccgtgacacaggagccttcgatgctgtgggtgaggtggaggcatggcacaggaactgcatagcctacacaagcccctggagcccttgctccaccagctgcggcctgggggtctccactcggatctccaatgttaacgcccagtgctggcctgagcaagagagccgcctctgcaacttgcggccatgcgatgtggacatccatacactcattaaggcagggaagaagtgtctggctgtgtaccagccagaggcatccatgaacttcacacttgcgggctgcatcagcacacgctcctatcaacccaagtactgtggagtttgcatggacaataggtgctgcatcccctacaagtctaagactatcgacgtgtccttccagtgtcctgatgggcttggcttctcccgccaggtcctatggattaatgcctgcttctgtaacctgagctgtaggaatcccaatgacatctttgctgacttggaatcctaccctgacttctcagaaattgccaactaggcaggcacaaatcttgggtcttggggactaacccaatgcctgtgaagcagtcagcccttatggccaataacttttcaccaatgagccttagttaccctgatctggacccttggcctccatttctgtctctaaccattcaaatgacgcctgatggtgctgctcaggcccatgctatgagttttctccttgatatcattcagcatctactctaaagaaaaatgcctgtctctagctgttctggactacacccaagcctgatccagcctttccaagtcactagaagtcctgctggatcttgcctaaatcccaagaaatggaatcaggtagacttttaatatcactaatttcttctttagatgccaaaccacaagactctttgggtccattcagatgaatagatggaatttggaacaatagaataatctattatttggagcctgccaagaggtactgtaatgggtaattctgacgtcagcgcaccaaaactatcctgattccaaatatgtatgcacctcaaggtcatcaaacatttgccaagtgagttgaatagttgcttaattttgatttttaatggaaagttgtatccattaacctgggcattgttgaggttaagtttctcttcacccctacactgtgaagggtacagattaggtttgtcccagtcagaaataaaatttgataaacattcctgttgatgggaaaagcccccagttaatactccagagacagggaaaggtcagcccgtttcagaaggaccaattgactctcacactgaatcagctgctgactggcagggctttgggcagttggccaggctcttccttgaatcttctcccttgtcctgcttggggttcataggaattggtaaggcctctggactggcctgtctggcccctgagagtggtgccctggaacactcctctactcttacagagccttgagagacccagctgcagaccatgccagacccactgaaatgaccaagacaggttcaggtaggggtgtgggtcaaaccaagaagtgggtgcccttggtagcagcctggggtgacctctagagctggaggctgtgggactccaggggcccccgtgttcaggacacatctattgcagagactcatttcacagcctttcgttctgctgaccaaatggccagttttctggtaggaagatggaggtttaccggttgtttagaaacagaaatagacttaataaaggtttaaagctgaagaggttgaagctaaaaggaaaaggttgttgttaatgaatatcaggctattatttattgtattaggaaaatataatatttactgttagaattcttttatttagggccttttctgtgccagacattgctctcagtgctttgcatgtattagctcactgaatcttcacgacaatgttgagaagttcccattattatttctgttcttacaaatgtgaaacggaagctcatagaggtgagaaaactcaaccagagtcacccagttggtgactgggaaagttaggattcagatcgaaattggactgtctttataacccatattttccccctgtttttagagcttccaaatgtgtcagaataggaaaacattgcaataaatggcttgattttttaaaaaaaaaaaaaaaaaaaaaaa

SEQ ID NO: 237 - DNA, 1433 bp, Homo sapiens
  Homo sapiens WNT1 inducible signaling pathway protein 2 (WISP2),
tgtgtgtgtgtgtgtgtgagcgcgcgcgcgcgcgcgcgtgtgtactcgtgcgtgtgcctgtgtgtgcctgggagtgacctcacagctgccggaacataaagactcacaggtccgcctcccaggctcaaagctggctctgcaggggacatgagaggcacaccgaagacccacctcctggccttctccctcctctgcctcctctcaaaggtgcgtacccagctgtgcccgacaccatgtacctgcccctggccacctccccgatgcccgctgggagtacccctggtgctggatggctgtggctgctgccgggtatgtgcacggcggctgggggagccctgcgaccaactccacgtctgcgacgccagccagggcctggtctgccagcccggggcaggacccggtggccggggggccctgtgcctcttggcagaggacgacagcagctgtgaggtgaacggccgcctgtatcgggaaggggagaccttccagccccactgcagcatccgctgccgctgcgaggacggcggcttcacctgcgtgccgctgtgcagcgaggatgtgcggctgcccagctgggactgcccccaccccaggagggtcgaggtcctgggcaagtgctgccctgagtgggtgtgcggccaaggagggggactggggacccagccccttccagcccaaggaccccagttttctggccttgtctcttccctgccccctggtgtcccctgcccagaatggagcacggcctggggaccctgctcgaccacctgtgggctgggcatggccacccgggtgtccaaccagaaccgcttctgccgactggagacccagcgccgcctgtgcctgtccaggccctgcccaccctccaggggtcgcagtccacaaaacagtgccttctagagccgggctgggaatggggacacggtgtccaccatccccagctggtggccctgtgcctgggccctgggctgatggaagatggtccgtgcccaggcccttggctgcaggcaacactttagcttgggtccaccatgcagaacaccaatattaacacgctgcctggtctgtctggatcccgaggtatggcagaggtgcaagacctagtcccctttcctctaactcactgcctaggaggctggccaaggtgtccagggtcctctagcccactccctgcctacacacacagcctatatcaaacatgcacacgggcgagctttctctccgacttcccctgggcaagagatgggacaagcagtcccttaatattgaggctgcagcaggtgctgggctggactggccatttttctgggggtaggatgaagagaaggcacacagagattctggatctcctgctgccttttctggagtttgtaaaattgttcctgaatacaagcctatgcgtgaaaaaaaaaaaaaaaaaaaaaaaaaaaaaa

SEQ ID NO: 238 - DNA, 1068 bp, Homo sapiens
  Homo sapiens WNT1 inducible signaling pathway protein 3 (WISP3), transcript variant 2, mRNA
atgaagatatctaggggcagagtgtgcttggagtcagagaacaaggacgctggtgtggctggtcgtaaacagttttgtcactggccctgcaaatgccctcagcagaagccccgttgccctcctggagtgagcctggtgagagatggctgtggatgctgtaaaatctgtgccaagcaaccaggggaaatctgcaatgaagctgacctctgtgacccacacaaagggctgtattgtgactactcagtagacaggcctaggtacgagactggagtgtgtgcatgtaagtctgttgggtgcgagttcaaccaggtacattatcataatggccaagtgtttcagcccaaccccttgttcagctgcctctgtgtgagtggggccattggatgcacacctctgttcataccaaagctggctggcagtcactgctctggagctaaaggtggaaagaagtctgatcagtcaaactgtagcctggaaccattactacagcagctttcaacaagctacaaaacaatgccagcttatagaaatctcccacttatttggaaaaaaaaatgtcttgtgcaagcaacaaaatggactccctgctccagaacatgtgggatgggaatatctaacagggtgaccaatgaaaacagcaactgtgaaatgagaaaagagaaaagactgtgttacattcagccttgcgacagcaatatattaaagacaataaagattcccaaaggaaaaacatgccaacctactttccaactctccaaagctgaaaaatttgtcttttctggatgctcaagtactcagagttacaaacccactttttgtggaatatgcttggataagagatgctgtatccctaataagtctaaaatgattactattcaatttgattgcccaaatgaggggtcatttaaatggaagatgctgtggattacatcttgtgtgtgtcagagaaactgcagagaacctggagatatattttctgagctcaagattctgtaaaaccaagcaaatgggggaaaagttagtcaatcctgtcatataataaaaaaattagtgagtataaaaaaaaaa

SEQ ID NO: 239 - DNA, 1307 bp, Homo sapiens
  Homo sapiens WNT1 inducible signaling pathway protein 3 (WISP3), transcript variant 1, mRNA
cctgagtcccgggaggaaagtgctcgcccattcctgacctgtgacacgctcactgcgaaggcaggttattagaagagtcccatgaaaggtggctccacggtcccagcgacatgcaggggctcctcttctccactcttctgcttgctggcctggcacagttctgctgcagggtacagggcactggaccattagatacaacacctgaaggaaggcctggagaagtgtcagatgcacctcagcgtaaacagttttgtcactggccctgcaaatgccctcagcagaagccccgttgccctcctggagtgagcctggtgagagatggctgtggatgctgtaaaatctgtgccaagcaaccaggggaaatctgcaatgaagctgacctctgtgacccacacaaagggctgtattgtgactactcagtagacaggcctaggtacgagactggagtgtgtgcataccttgtagctgttgggtgcgagttcaaccaggtacattatcataatggccaagtgtttcagcccaaccccttgttcagctgcctctgtgtgagtggggccattggatgcacacctctgttcataccaaagctggctggcagtcactgctctggagctaaaggtggaaagaagtctgatcagtcaaactgtagcctggaaccattactacagcagctttcaacaagctacaaaacaatgccagcttatagaaatctcccacttatttggaaaaaaaaatgtcttgtgcaagcaacaaaatggactccctgctccagaacatgtgggatgggaatatctaacagggtgaccaatgaaaacagcaactgtgaaatgagaaaagagaaaagactgtgttacattcagccttgcgacagcaatatattaaagacaataaagattcccaaaggaaaaacatgccaacctactttccaactctccaaagctgaaaaatttgtcttttctggatgctcaagtactcagagttacaaacccactttttgtggaatatgcttggataagagatgctgtatccctaataagtctaaaatgattactattcaatttgattgcccaaatgaggggtcatttaaatggaagatgctgtggattacatcttgtgtgtgtcagagaaactgcagagaacctggagatatattttctgagctcaagattctgtaaaaccaagcaaatgggggaaaagttagtcaatcctgtcatataataaaaaaattagtgagtaaaaaaaaaaaaaaaaaaaaaaaaaaaaaaaaaaaaaaaaaaaaaaaaaaagaaaaaaaaaaaaaaaaaaaa

SEQ ID NO: 240 - DNA, 2312 bp, Homo sapiens; identical to SEQ ID NO: 91
  Homo sapiens connective tissue growth factor (CTGF), mRNA

SEQ ID NO: 241 - DNA, 1887 bp, Homo sapiens
  Homo sapiens cysteine-rich, angiogenic inducer, 61 (CYR61), mRNA
gcgcacggcctgtccgctgcacaccagcttgttggcgtcttcgtcgccgcgctcgccccgggctactcctgcgcgccacaatgagctcccgcatcgccagggcgctcgccttagtcgtcacccttctccacttgaccaggctggcgctctccacctgccccgctgcctgccactgccccctggaggcgcccaagtgcgcgccgggagtcgggctggtccgggacggctgcggctgctgtaaggtctgcgccaagcagctcaacgaggactgcagcaaaacgcagccctgcgaccacaccaaggggctggaatgcaacttcggcgccagctccaccgctctgaaggggatctgcagagctcagtcagagggcagaccctgtgaatataactccagaatctaccaaaacggggaaagtttccagcccaactgtaaacatcagtgcacatgtattgatggcgccgtgggctgcattcctctgtgtccccaagaactatctctccccaacttgggctgtcccaaccctcggctggtcaaagttaccgggcagtgctgcgaggagtgggtctgtgacgaggatagtatcaaggaccccatggaggaccaggacggcctccttggtaaggagctgggattcgatgcctccgaggtggagttgacgagaaacaatgaattgattgcagttggaaaaggcagctcactgaagcggatccctgtttttggaatggagcctcgcatccgatacaaccctttacaaggccagaaatgtattgttcaaacaacttcatggtcccagtgctcaaagacctgtggaactggtatctccacacgagttaccaatgacaaccctgagtgccgccttgtgaaagaaacccggatttgtgaggtgcggccttgtggacagccagtgtacagcagcctgaaaaagggcaagaaatgcagcaagaccaagaaatcccccgaaccagtcaggtttacttacgctggatgtttgagtgtgaagaaataccggcccaagtactgcggttcctgcgtggacggccgatgctgcacgccccagctgaccaggactgtgaagatgcggttccgctgcgaagatggggagacattttccaagaacgtcatgatgatccagtcctgcaaatgcaactacaactgcccgcatgccaatgaagcagcgtttcccttctacaggctgttcaatgacattcacaaatttagggactaaatgctacctgggtttccagggcacacctagacaaacaagggagaagagtgtcagaatcagaatcatggagaaaatgggcgggggtggtgtgggtgatgggactcattgtagaaaggaagccttgctcattcttgaggagcattaaggtatttcgaaactgccaagggtgctggtgcggatggacactaatgcagccacgattggagaatactttgcttcatagtattggagcacatgttactgcttcattttggagcttgtggagttgatgactttctgttttctgtttgtaaattatttgctaagcatattttctctaggcttttttccttttggggttctacagtcgtaaaagagataataagattagttggacagtttaaagcttttattcgtcctttgacaaaagtaaatgggagggcattccatcccttcctgaagggggacactccatgagtgtctgtgagaggcagctatctgcactctaaactgcaaacagaaatcaggtgttttaagactgaatgttttatttatcaaaatgtagcttttggggagggaggggaaatgtaatactggaataatttgtaaatgattttaattttatattcagtgaaaagattttatttatggaattaaccatttaataaagaaatatttacct

SEQ ID NO: 242 - DNA, 1973 bp, Homo sapiens; identical to SEQ ID NO: 107
  Homo sapiens nephroblastoma overexpressed gene (NOV), mRNA

SEQ ID NO: 243 - DNA, 14896 bp, Homo sapiens
  Homo sapiens low density lipoprotein-related protein 1
cagcggtgcgagctccaggcccatgcactgaggaggcggaaacaaggggagcccccagagctccatcaagccccctccaaaggctcccctacccggtccacgccccccaccccccctccccgcctcctcccaattgtgcatttttgcagccggaggcggctccgagatggggctgtgagcttcgcccggggagggggaaagagcagcgaggagtgaagcgggggggtggggtgaagggtttggatttcggggcagggggcgcacccccgtcagcaggccctccccaaggggctcggaactctacctcttcacccacgcccctggtgcgctttgccgaaggaaagaataagaacagagaaggaggagggggaaaggaggaaaagggggaccccccaactggggggggtgaaggagagaagtagcaggaccagaggggaaggggctgctgcttgcatcagcccacaccatgctgaccccgccgttgctcctgctgctgcccctgctctcagctctggtcgcggcggctatcgacgcccctaagacttgcagccccaagcagtttgcctgcagagatcaaataacctgtatctcaaagggctggcggtgcgacggtgagagggactgcccagacggatctgacgaggcccctgagatttgtccacagagtaaggcccagcgatgccagccaaacgagcataactgcctgggtactgagctgtgtgttcccatgtcccgcctctgcaatggggtccaggactgcatggacggctcagatgaggggccccactgccgagagctccaaggcaactgctctcgcctgggctgccagcaccattgtgtccccacactcgatgggcccacctgctactgcaacagcagctttcagcttcaggcagatggcaagacctgcaaagattttgatgagtgctcagtgtacggcacctgcagccagctatgcaccaacacagacggctccttcatatgtggctgtgttgaaggatacctcctgcagccggataaccgctcctgcaaggccaagaacgagccagtagaccggccccctgtgctgttgatagccaactcccagaacatcttggccacgtacctgagtggggcccaggtgtctaccatcacacctacgagcacgcggcagaccacagccatggacttcagctatgccaacgagaccgtatgctgggtgcatgttggggacagtgctgctcagacgcagctcaagtgtgcccgcatgcctggcctaaagggcttcgtggatgagcacaccatcaacatctccctcagtctgcaccacgtggaacagatggccatcgactggctgacaggcaacttctactttgtggatgacatcgatgataggatctttgtctgcaacagaaatggggacacatgtgtcacattgctagacctggaactctacaaccccaagggcattgccctggaccctgccatggggaaggtgtttttcactgactatgggcagatcccaaaggtggaacgctgtgacatggatgggcagaaccgcaccaagctcgtcgacagcaagattgtgtttcctcatggcatcacgctggacctggtcagccgccttgtctactgggcagatgcctatctggactatattgaagtggtggactatgagggcaagggccgccagaccatcatccagggcatcctgattgagcacctgtacggcctgactgtgtttgagaattatctctatgccaccaactcggacaatgccaatgcccagcagaagacgagtgtgatccgtgtgaaccgctttaacagcaccgagtaccaggttgtcacccgggtggacaagggtggtgccctccacatctaccaccagaggcgtcagccccgagtgaggagccatgcctgtgaaaacgaccagtatgggaagccgggtggctgctctgacatctgcctgctggccaacagccacaaggcgcggacctgccgctgccgttccggcttcagcctgggcagtgacgggaagtcatgcaagaagccggagcatgagctgttcctcgtgtatggcaagggccggccaggcatcatccggggcatggatatgggggccaaggtcccggatgagcacatgatccccattgaaaacctcatgaacccccgagccctggacttccacgctgagaccggcttcatctactttgccgacaccaccagctacctcattggccgccagaagattgatggcactgagcgggagaccatcctgaaggacggcatccacaatgtggagggtgtggccgtggactggatgggagacaatctgtactggacggacgatgggcccaaaaagacaatcagcgtggccaggctggagaaagctgctcagacccgcaagactttaatcgagggcaaaatgacacaccccagggctattgtggtggatccactcaatgggtggatgtactggacagactgggaggaggaccccaaggacagtcggcgtgggcggctggagagggcgtggatggatggctcacaccgagacatctttgtcacctccaagacagtgctttggcccaatgggctaagcctggacatcccggctgggcgcctctactgggtggatgccttctacgaccgcatcgagacgatactgctcaatggcacagaccggaagattgtgtatgaaggtcctgagctgaaccacgcctttggcctgtgtcaccatggcaactacctcttctggactgagtatcggagtggcagtgtctaccgcttggaacggggtgtaggaggcgcaccccccactgtgacccttctgcgcagtgagcggccccccatctttgagatccgaatgtatgatgcccagcagcagcaagttggcaccaacaaatgccgggtgaacaatggcggctgcagcagcctgtgcttggccacccctgggagccgccagtgcgcctgtgctgaggaccaggtgttggacgcagacggcgtcacttgcttggcgaacccatcctacgtgcctccaccccagtgccagccaggcgagtttgcctgtgccaacagccgctgcatccaggagcgctggaagtgtgacggagacaacgattgcctggacaacagtgatgaggccccagccctctgccatcagcacacctgcccctcggaccgattcaagtgcgagaacaaccggtgcatccccaaccgctggctctgcgacggggacaatgactgtgggaacagtgaagatgagtccaatgccacttgttcagcccgcacctgcccccccaaccagttctcctgtgccagtggccgctgcatccccatctcctggacgtgtgatctggatgacgactgtggggaccgctctgatgagtctgcttcgtgtgcctatcccacctgcttccccctgactcagtttacctgcaacaatggcagatgtatcaacatcaactggagatgcgacaatgacaatgactgtggggacaacagtgacgaagccggctgcagccactcctgttctagcacccagttcaagtgcaacagcgggcgttgcatccccgagcactggacctgcgatggggacaatgactgcggagactacagtgatgagacacacgccaactgcaccaaccaggccacgaggccccctggtggctgccacactgatgagttccagtgccggctggatggactatgcatccccctgcggtggcgctgcgatggggacactgactgcatggactccagcgatgagaagagctgtgagggagtgacccacgtctgcgatcccagtgtcaagtttggctgcaaggactcagctcggtgcatcagcaaagcgtgggtgtgtgatggcgacaatgactgtgaggataactcggacgaggagaactgcgagtccctggcctgcaggccaccctcgcacccttgtgccaacaacacctcagtctgcctgccccctgacaagctgtgtgatggcaacgacgactgtggcgacggctcagatgagggcgagctctgcgaccagtgctctctgaataacggtggctgcagccacaactgctcagtggcacctggcgaaggcattgtgtgttcctgccctctgggcatggagctggggcccgacaaccacacctgccagatccagagctactgtgccaagcatctcaaatgcagccaaaagtgcgaccagaacaagttcagcgtgaagtgctcctgctacgagggctgggtcctggaacctgacggcgagagctgccgcagcctggaccccttcaagccgttcatcattttctccaaccgccatgaaatccggcgcatcgatcttcacaaaggagactacagcgtcctggtgcccggcctgcgcaacaccatcgccctggacttccacctcagccagagcgccctctactggaccgacgtggtggaggacaagatctaccgcgggaagctgctggacaacggagccctgactagtttcgaggtggtgattcagtatggcctggccacacccgagggcctggctgtagactggattgcaggcaacatctactgggtggagagtaacctggatcagatcgaggtggccaagctggatgggaccctccggaccaccctgctggccggtgacattgagcacccaagggcaatcgcactggatccccgggatgggatcctgttttggacagactgggatgccagcctgccccgcattgaggcagcctccatgagtggggctgggcgccgcaccgtgcaccgggagaccggctctgggggctggcccaacgggctcaccgtggactacctggagaagcgcatcctttggattgacgccaggtcagatgccatttactcagcccgttacgacggctctggccacatggaggtgcttcggggacacgagttcctgtcgcacccgtttgcagtgacgctgtacgggggggaggtctactggactgactggcgaacaaacacactggctaaggccaacaagtggaccggccacaatgtcaccgtggtacagaggaccaacacccagccctttgacctgcaggtgtaccacccctcccgccagcccatggctcccaatccctgtgaggccaatgggggccagggcccctgctcccacctgtgtctcatcaactacaaccggaccgtgtcctgcgcctgcccccacctcatgaagctccacaaggacaacaccacctgctatgagtttaagaagttcctgctgtacgcacgtcagatggagatccgaggtgtggacctggatgctccctactacaactacatcatctccttcacggtgcccgacatcgacaacgtcacagtgctagactacgatgcccgcgagcagcgtgtgtactggtctgacgtgcggacacaggccatcaagcgggccttcatcaacggcacaggcgtggagacagtcgtctctgcagacttgccaaatgcccacgggctggctgtggactgggtctcccgaaacctgttctggacaagctatgacaccaataagaagcagatcaatgtggcccggctggatggctccttcaagaacgcagtggtgcagggcctggagcagccccatggccttgtcgtccaccctctgcgtgggaagctctactggaccgatggtgacaacatcagcatggccaacatggatggcagcaatcgcaccctgctcttcagtggccagaagggccccgtgggcctggctattgacttccctgaaagcaaactctactggatcagctccgggaaccataccatcaaccgctgcaacctggatgggagtgggctggaggtcatcgatgccatgcggagccagctgggcaaggccaccgccctggccatcatgggggacaagctgtggtgggctgatcaggtgtcggaaaagatgggcacatgcagcaaggctgacggctcgggctccgtggtccttcggaacagcaccaccctggtgatgcacatgaaggtctatgacgagagcatccagctggaccataagggcaccaacccctgcagtgtcaacaacggtgactgctcccagctctgcctgcccacgtcagagacgacccgctcctgcatgtgcacagccggctatagcctccggagtggccagcaggcctgcgagggcgtaggttcctttctcctgtactctgtgcatgagggaatcaggggaattcccctggatcccaatgacaagtcagatgccctggtcccagtgtccgggacctcgctggctgtcggcatcgacttccacgctgaaaatgacaccatctactgggtggacatgggcctgagcacgatcagccgggccaagcgggaccagacgtggcgtgaagacgtggtgaccaatggcattggccgtgtggagggcattgcagtggactggatcgcaggcaacatctactggacagaccagggctttgatgtcatcgaggtcgcccggctcaatggctccttccgctacgtggtgatctcccagggtctagacaagccccgggccatcaccgtccacccggagaaagggtacttgttctggactgagtggggtcagtatccgcgtattgagcggtctcggctagatggcacggagcgtgtggtgctggtcaacgtcagcatcagctggcccaacggcatctcagtggactaccaggatgggaagctgtactggtgcgatgcacggacagacaagattgaacggatcgacctggagacaggtgagaaccgcgaggtggttctgtccagcaacaacatggacatgttttcagtgtctgtgtttgaggatttcatctactggagtgacaggactcatgccaacggctctatcaagcgcgggagcaaagacaatgccacagactccgtgcccctgcgaaccggcatcggcgtccagcttaaagacatcaaagtcttcaaccgggaccggcagaaaggcaccaacgtgtgcgcggtggccaatggcgggtgccagcagctgtgcctgtaccggggccgtgggcagcgggcctgcgcctgtgcccacgggatgctggctgaagacggagcatcgtgccgcgagtatgccggctacctgctctactcagagcgcaccattctcaagagtatccacctgtcggatgagcgcaacctcaatgcgcccgtgcagcccttcgaggaccctgagcacatgaagaacgtcatcgccctggcctttgactaccgggcaggcacctctccgggcacccccaatcgcatcttcttcagcgacatccactttgggaacatccaacagatcaacgacgatggctccaggaggatcaccattgtggaaaacgtgggctccgtggaaggcctggcctatcaccgtggctgggacactctctattggacaagctacacgacatccaccatcacgcgccacacagtggaccagacccgcccaggggccttcgagcgtgagaccgtcatcactatgtctggagatgaccacccacgggccttcgttttggacgagtgccagaacctcatgttctggaccaactggaatgagcagcatcccagcatcatgcgggcggcgctctcgggagccaatgtcctgacccttatcgagaaggacatccgtacccccaatggcctggccatcgaccaccgtgccgagaagctctacttctctgacgccaccctggacaagatcgagcggtgcgagtatgacggctcccaccgctatgtgatcctaaagtcagagcctgtccaccccttcgggctggccgtgtatggggagcacattttctggactgactgggtgcggcgggcagtgcagcgggccaacaagcacgtgggcagcaacatgaagctgctgcgcgtggacatcccccagcagcccatgggcatcatcgccgtggccaacgacaccaacagctgtgaactctctccatgccgaatcaacaacggtggctgccaggacctgtgtctgctcactcaccagggccatgtcaactgctcatgccgagggggccgaatcctccaggatgacctcacctgccgagcggtgaattcctcttgccgagcacaagatgagtttgagtgtgccaatggcgagtgcatcaacttcagcctgacctgcgacggcgtcccccactgcaaggacaagtccgatgagaagccatcctactgcaactcccgccgctgcaagaagactttccggcagtgcagcaatgggcgctgtgtgtccaacatgctgtggtgcaacggggccgacgactgtggggatggctctgacgagatcccttgcaacaagacagcctgtggtgtgggcgagttccgctgccgggacgggacctgcatcgggaactccagccgctgcaaccagtttgtggattgtgaggacgcctcagatgagatgaactgcagtgccaccgactgcagcagctacttccgcctgggcgtgaagggcgtgctcttccagccctgcgagcggacctcactctgctacgcacccagctgggtgtgtgatggcgccaatgactgtggggactacagtgatgagcgcgactgcccaggtgtgaaacgccccagatgccctctgaattacttcgcctgccctagtgggcgctgcatccccatgagctggacgtgtgacaaagaggatgactgtgaacatggcgaggacgagacccactgcaacaagttctgctcagaggcccagtttgagtgccagaaccatcgctgcatctccaagcagtggctgtgtgacggcagcgatgactgtggggatggctcagacgaggctgctcactgtgaaggcaagacgtgcggcccctcctccttctcctgccctggcacccacgtgtgcgtccccgagcgctggctctgtgacggtgacaaagactgtgctgatggtgcagacgagagcatcgcagctggttgcttgtacaacagcacttgtgacgaccgtgagttcatgtgccagaaccgccagtgcatccccaagcacttcgtgtgtgaccacgaccgtgactgtgcagatggctctgatgagtcccccgagtgtgagtacccgacctgcggccccagtgagttccgctgtgccaatgggcgctgtctgagctcccgccagtgggagtgtgatggcgagaatgactgccacgaccagagtgacgaggctcccaagaacccacactgcaccagcccagagcacaagtgcaatgcctcgtcacagttcctgtgcagcagtgggcgctgtgtggctgaggcactgctctgcaacggccaggatgactgtggcgacagctcggacgagcgtggctgccacatcaatgagtgtctcagccgcaagctcagtggctgcagccaggactgtgaggacctcaagatcggcttcaagtgccgctgtcgccctggcttccggctgaaggatgacggccggacgtgtgctgatgtggacgagtgcagcaccaccttcccctgcagccagcgctgcatcaacacccatggcagctataagtgtctgtgtgtggagggctatgcaccccgcggcggcgacccccacagctgcaaggctgtgactgacgaggaaccgtttctgatcttcgccaaccggtactacctgcgcaagctcaacctggacgggtccaactacacgttacttaagcagggcctgaacaacgccgttgccttggattttgactaccgagagcagatgatctactggacagatgtgaccacccagggcagcatgatccgaaggatgcaccttaacgggagcaatgtgcaggtcctacaccgtacaggcctcagcaaccccgatgggctggctgtggactgggtgggtggcaacctgtactggtgcgacaaaggccgggacaccatcgaggtgtccaagctcaatggggcctatcggacggtgctggtcagctctggcctccgtgagcccagggctctggtggtggatgtgcagaatgggtacctgtactggacagactggggtgaccattcactgatcggccgcatcggcatggatgggtccagccgcagcgtcatcgtggacaccaagatcacatggcccaatggcctgacgctggactatgtcactgagcgcatctactgggccgacgcccgcgaggactacattgaatttgccagcctggatggctccaatcgccacgttgtgctgagccaggacatcccgcacatctttgcactgaccctgtttgaggactacgtctactggaccgactgggaaacaaagtccattaaccgagcccacaagaccacgggcaccaacaaaacgctcctcatcagcacgctgcaccggcccatggacctgcatgtcttccatgccctgcgccagccagacgtgcccaatcacccctgcaaggtcaacaatggtggctgcagcaacctgtgcctgctgtcccccgggggagggcacaaatgtgcctgccccaccaacttctacctgggcagcgatgggcgcacctgtgtgtccaactgcacggctagccagtttgtatgcaagaacgacaagtgcatccccttctggtggaagtgtgacaccgaggacgactgcggggaccactcagacgagcccccggactgccctgagttcaagtgccggcccggacagttccagtgctccacaggtatctgcacaaaccctgccttcatctgcgatggcgacaatgactgccaggacaacagtgacgaggccaactgtgacatccacgtctgcttgcccagtcagttcaaatgcaccaacaccaaccgctgtattcccggcatcttccgctgcaatgggcaggacaactgcggagatggggaggatgagagggactgccccgaggtgacctgcgcccccaaccagttccagtgctccattaccaaacggtgcatcccccgggtctgggtctgcgaccgggacaatgactgtgtggatggcagtgatgagcccgccaactgcacccagatgacctgtggtgtggacgagttccgctgcaaggattcgggccgctgcatcccagcgcgttggaagtgtgacggagaggatgactgtggggatggctcggatgagcccaaggaagagtgtgatgaacgcacctgtgagccataccagttccgctgcaagaacaaccgctgcgtgcccggccgctggcagtgcgactacgacaacgattgcggtgacaactccgatgaagagagctgcacccctcggccctgctccgagagtgagttctcctgtgccaacggccgctgcatcgcggggcgctggaaatgcgatggagaccacgactgcgcggacggctcggacgagaaagactgcaccccccgctgtgacatggaccagttccagtgcaagagcggccactgcatccccctgcgctggcgctgtgacgcagacgccgactgcatggacggcagcgacgaggaggcctgcggcactggcgtgcggacctgccccctggacgagttccagtgcaacaacaccttgtgcaagccgctggcctggaagtgcgatggcgaggatgactgtggggacaactcagatgagaaccccgaggagtgtgcccggttcgtgtgccctcccaaccggcccttccgttgcaagaatgaccgcgtctgtctgtggatcgggcgccaatgcgatggcacggacaactgtggggatgggactgatgaagaggactgtgagccccccacagcccacaccacccactgcaaagacaagaaggagtttctgtgccggaaccagcgctgcctctcctcctccctgcgctgcaacatgttcgatgactgcggggacggctctgacgaggaggactgcagcatcgaccccaagctgaccagctgcgccaccaatgccagcatctgtggggacgaggcacgctgcgtgcgcaccgagaaagcggcctactgtgcctgccgctcgggcttccacaccgtgcccggccagcccggatgccaagacatcaacgagtgcctgcgcttcggcacctgctcccagctctgcaacaacaccaagggcggccacctctgcagctgcgctcggaacttcatgaagacgcacaacacctgcaaggccgaaggctctgagtaccaggtcctgtacatcgctgatgacaatgagatccgcagcctgttccccggccacccccattcggcttacgagcaggcattccagggtgacgagagtgtccgcattgatgctatggatgtccatgtcaaggctggccgtgtctattggaccaactggcacacgggcaccatctcctaccgcagcctgccacctgctgcgcctcctaccacttccaaccgccaccggcgacagattgaccggggtgtcacccacctcaacatttcagggctgaagatgcccagaggcatcgccatcgactgggtggccggaaacgtgtactggaccgactcgggccgagatgtgattgaggtggcgcagatgaagggcgagaaccgcaagacgctcatctcgggcatgattgacgagccccacgccattgtggtggacccactgagggggaccatgtactggtcagactggggcaaccaccccaagattgagacggcagcgatggatgggacgcttcgggagacactggtgcaggacaacattcagtggcccacaggcctggccgtggattatcacaatgagcggctgtactgggcagacgccaagctttcagtcatcggcagcatccggctcaatggcacggaccccattgtggctgctgacagcaaacgaggcctaagtcaccccttcagcatcgacgtctttgaggattacatctatggtgtcacctacatcaataatcgtgtcttcaagatccataagtttggccacagccccttggtcaacctgacagggggcctgagccacgcctctgacgtggtcctttaccatcagcacaagcagcccgaagtgaccaacccatgtgaccgcaagaaatgcgagtggctctgcctgctgagccccagtgggcctgtctgcacctgtcccaatgggaagcggctggacaacggcacatgcgtgcctgtgccctctccaacgccccccccagatgctccccggcctggaacctgtaacctgcagtgcttcaacggtggcagctgtttcctcaatgcacggaggcagcccaagtgccgctgccaaccccgctacacgggtgacaagtgtgaactggaccagtgctgggagcactgtcgcaatgggggcacctgtgctgcctccccctctggcatgcccacgtgccggtgccccacgggcttcacgggccccaaatgcacccagcaggtgtgtgcgggctactgtgccaacaacagcacctgcactgtcaaccagggcaaccagccccagtgccgatgcctacccggcttcctgggcgaccgctgccagtaccggcagtgctctggctactgtgagaactttggcacatgccagatggctgctgatggctcccgacaatgccgctgcactgcctactttgagggatcgaggtgtgaggtgaacaagtgcagccgctgtctcgaaggggcctgtgtggtcaacaagcagagtggggatgtcacctgcaactgcacggatggccgggtggcccccagctgtctgacctgcgtcggccactgcagcaatggcggctcctgtaccatgaacagcaaaatgatgcctgagtgccagtgcccaccccacatgacagggccccggtgtgaggagcacgtcttcagccagcagcagccaggacatatagcctccatcctaatccctctgctgttgctgctgctgctggttctggtggccggagtggtattctggtataagcggcgagtccaaggggctaagggcttccagcaccaacggatgaccaacggggccatgaacgtggagattggaaaccccacctacaagatgtacgaaggcggagagcctgatgatgtgggaggcctactggacgctgactttgccctggaccctgacaagcccaccaacttcaccaaccccgtgtatgccacactctacatggggggccatggcagtcgccactccctggccagcacggacgagaagcgagaactcctgggccggggccctgaggacgagataggggaccccttggcatagggccctgccccgtcggactgcccccagaaagcctcctgccccctgccggtgaagtccttcagtgagcccctccccagccagcccttccctggccccgccggatgtataaatgtaaaaatgaaggaattacattttatatgtgagcgagcaagccggcaagcgagcacagtattatttctccatcccctccctgcctgctccttggcacccccatgctgccttcagggagacaggcagggagggcttggggctgcacctcctaccctcccaccagaacgcaccccactgggagagctggtggtgcagccttcccctccctgtataagacactttgccaaggctctcccctctcgccccatccctgcttgcccgctcccacagcttcctgagggctaattctgggaagggagagttctttgctgcccctgtctggaagacgtggctctgggtgaggtaggcgggaaaggatggagtgttttagttcttgggggaggccaccccaaaccccagccccaactccaggggcacctatgagatggccatgctcaacccccctcccagacaggccctccctgtctccagggcccccaccgaggttcccagggctggagacttcctctggtaaacattcctccagcctcccctcccctggggacgccaaggaggtgggccacacccaggaagggaaagcgggcagccccgttttggggacgtgaacgttttaataatttttgctgaattctttacaactaaataacacagatattcttataaataaaattgtaaaaaaaaaaa

SEQ ID NO: 244 - DNA, 14392 bp, Homo sapiens
  Homo sapiens low density lipoprotein-related protein 2 (LRP2), mRNA
gcagacctaaaggagcgttcgctagcagaggcgctgccggtgcggtgtgctacgcgcgcccacctcccggggaaggaacggcgaggccggggaccgtcgcggagatggatcgcgggccggcagcagtggcgtgcacgctgctcctggctctcgtcgcctgcctagcgccggccagtggccaagaatgtgacagtgcgcattttcgctgtggaagtgggcattgcatccctgcagactggaggtgtgatgggaccaaagactgttcagatgacgcggatgaaattggctgcgctgttgtgacctgccagcagggctatttcaagtgccagagtgagggacaatgcatccccagctcctgggtgtgtgaccaagatcaagactgtgatgatggctcagatgaacgtcaagattgctcacaaagtacatgctcaagtcatcagataacatgctccaatggtcagtgtatcccaagtgaatacaggtgcgaccacgtcagagactgccccgatggagctgatgagaatgactgccagtacccaacatgtgagcagcttacttgtgacaatggggcctgctataacaccagtcagaagtgtgattggaaagttgattgcagggactcctcagatgaaatcaactgcactgagatatgcttgcacaatgagttttcatgtggcaatggagagtgtatccctcgtgcttatgtctgtgaccatgacaatgattgccaagacggcagtgatgaacatgcttgcaactatccgacctgcggtggttaccagttcacttgccccagtggccgatgcatttatcaaaactgggtttgtgatggagaagatgactgtaaagataatggagatgaagatggatgtgaaagcggtcctcatgatgttcataaatgttccccaagagaatggtcttgcccagagtcgggacgatgcatctccatttataaagtttgtgatgggattttagattgcccaggaagagaagatgaaaacaacactagtaccggaaaatactgtagtatgactctgtgctctgccttgaactgccagtaccagtgccatgagacgccgtatggaggagcgtgtttttgtcccccaggttatatcatcaaccacaatgacagccgtacctgtgttgagtttgatgattgccagatatggggaatttgtgaccagaagtgtgaaagccgacctggccgtcacctgtgccactgtgaagaagggtatatcttggagcgtggacagtattgcaaagctaatgattcctttggcgaggcctccattatcttctccaatggtcgggatttgttaattggtgatattcatggaaggagcttccggatcctagtggagtctcagaatcgtggagtggccgtgggtgtggctttccactatcacctgcaaagagttttttggacagacaccgtgcaaaataaggttttttcagttgacattaatggtttaaatatccaagaggttctcaatgtttctgttgaaaccccagagaacctggctgtggactgggttaataataaaatctatctagtggaaaccaaggtcaaccgcatagatatggtaaatttggatggaagctatcgggttacccttataactgaaaacttggggcatcctagaggaattgccgtggacccaactgttggttatttatttttctcagattgggagagcctttctggggaacctaagctggaaagggcattcatggatggcagcaaccgtaaagacttggtgaaaacaaagctgggatggcctgctggggtaactctggatatgatatcgaagcgtgtttactgggttgactctcggtttgattacattgaaactgtaacttatgatggaattcaaaggaagactgtagttcatggaggctccctcattcctcatccctttggagtaagcttatttgaaggtcaggtgttctttacagattggacaaagatggccgtgctgaaggcaaacaagttcacagagaccaacccacaagtgtactaccaggcttccctgaggccctatggagtgactgtttaccattccctcagacagccctatgctaccaatccgtgtaaagataacaatgggggctgtgagcaggtctgtgttctcagccacagaacagataatgatggtttgggtttccgttgcaagtgcacattcggcttccaactggatacagatgagcgccactgcattgctgttcagaatttcctcattttttcatcccaagttgctattcgtgggatcccgttcaccttgtctacccaggaagatgtcatggttccagtttcggggaatccttctttctttgtcgggattgattttgacgcccaggacagcactatctttttttcagatatgtcaaaacacatgatttttaagcaaaagattgatggcacaggaagagaaattctcgcagctaacagggtggaaaatgttgaaagtttggcttttgattggatttcaaagaatctctattggacagactctcattacaagagtatcagtgtcatgaggctagctgataaaacgagacgcacagtagttcagtatttaaataacccacggtcggtggtagttcatccttttgccgggtatctattcttcactgattggttccgtcctgctaaaattatgagagcatggagtgacggatctcacctcttgcctgtaataaacactactcttggatggcccaatggcttggccatcgattgggctgcttcacgattgtactgggtagatgcctattttgataaaattgagcacagcacctttgatggtttagacagaagaagactgggccatatagagcagatgacacatccgtttggacttgccatctttggagagcatttattttttactgactggagactgggtgccattattcgagtcaggaaagcagatggtggagaaatgacagttatccgaagtggcattgcttacatactgcatttgaaatcgtatgatgtcaacatccagactggttctaacgcctgtaatcaacccacgcatcctaacggtgactgcagccacttctgcttcccggtgccaaatttccagcgagtgtgtgggtgcccttatggaatgaggctggcttccaatcacttgacatgcgagggggacccaaccaatgaaccacccacggagcagtgtggcttattttccttcccctgtaaaaatggcagatgtgtgcccaattactatctctgtgatggagtcgatgattgtcatgataacagtgatgagcaactatgtggcacacttaataatacctgttcatcttcggcgttcacctgtggccatggggagtgcattcctgcacactggcgctgtgacaaacgcaacgactgtgtggatggcagtgatgagcacaactgccccacccacgcacctgcttcctgccttgacacccaatacacctgtgataatcaccagtgtatctcaaagaactgggtctgtgacacagacaatgattgtggggatggatctgatgaaaagaactgcaattcgacagagacatgccaacctagtcagtttaattgccccaatcatcgatgtattgacctatcgtttgtctgtgatggtgacaaggattgtgttgatggatctgatgaggttggttgtgtattaaactgtactgcttctcaattcaagtgtgccagtggggataaatgtattggcgtcacaaatcgttgtgatggtgtttttgattgcagtgacaactcggatgaagcgggctgtccaaccaggcctcctggtatgtgccactcagatgaatttcagtgccaagaagatggtatctgcatcccgaacttctgggaatgtgatgggcatccagactgcctctatggatctgatgagcacaatgcctgtgtccccaagacttgcccttcatcatatttccactgtgacaacggaaactgcatccacagggcatggctctgtgatcgggacaatgactgcggggatatgagtgatgagaaggactgccctactcagccctttcgctgtcctagttggcaatggcagtgtcttggccataacatctgtgtgaatctgagtgtagtgtgtgatggcatctttgactgccccaatgggacagatgagtccccactttgcaatgggaacagctgctcagatttcaatggtggttgtactcacgagtgtgttcaagagccctttggggctaaatgcctatgtccattgggattcttacttgccaatgattctaagacctgtgaagacatagatgaatgtgatattctaggctcttgtagccagcactgttacaatatgagaggttctttccggtgctcgtgtgatacaggctacatgttagaaagtgatgggaggacttgcaaagttacagcatctgagagtctgctgttacttgtggcaagtcagaacaaaattattgccgacagtgtcacctcccaggtccacaatatctattcattggtcgagaatggttcttacattgtagctgttgattttgattcaattagtggtcgtatcttttggtctgatgcaactcagggtaaaacctggagtgcgtttcaaaatggaacggacagaagagtggtatttgacagtagcatcatcttgactgaaactattgcaatagattgggtaggtcgtaatctttactggacagactatgctctggaaacaattgaagtctccaaaattgatgggagccacaggactgtgctgattagtaaaaacctaacaaatccaagaggactagcattagatcccagaatgaatgagcatctactgttctggtctgactggggccaccaccctcgcatcgagcgagccagcatggacggcagcatgcgcactgtcattgtccaggacaagatcttctggccctgcggcttaactattgactaccccaacagactgctctacttcatggactcctatcttgattacatggacttttgcgattataatggacaccatcggagacaggtgatagccagtgatttgattatacggcacccctatgccctaactctctttgaagactctgtgtactggactgaccgtgctactcgtcgggttatgcgagccaacaagtggcatggagggaaccagtcagttgtaatgtataatattcaatggccccttgggattgttgcggttcatccttcgaaacaaccaaattccgtgaatccatgtgccttttcccgctgcagccatctctgcctgctttcctcacaggggcctcatttttactcctgtgtttgtccttcaggatggagtctgtctcctgatctcctgaattgcttgagagatgatcaacctttcttaataactgtaaggcaacatataatttttggaatctcccttaatcctgaggtgaagagcaatgatgctatggtccccatagcagggatacagaatggtttagatgttgaatttgatgatgctgagcaatacatctattgggttgaaaatccaggtgaaattcacagagtgaagacagatggcaccaacaggacagtatttgcttctatatctatggtggggccttctatgaacctggccttagattggatttcaagaaacctttattctaccaatcctagaactcagtcaatcgaggttttgacactccacggagatatcagatacagaaaaacattgattgccaatgatgggacagctcttggagttggctttccaattggcataactgttgatcctgctcgtgggaagctgtactggtcagaccaaggaactgacagtggggttcctgccaagatcgccagtgctaacatggatggcacatctgtgaaaactctctttactgggaacctcgaacacctggagtgtgtcactcttgacatcgaagagcagaaactctactgggcagtcactggaagaggagtgattgaaagaggaaacgtggatggaacagatcggatgatcctggtacaccagctttcccacccctggggaattgcagtccatgattctttcctttattatactgatgaacagtatgaggtcattgaaagagttgataaggccactggggccaacaaaatagtcttgagagataatgttccaaatctgaggggtcttcaagtttatcacagacgcaatgccgccgaatcctcaaatggctgtagcaacaacatgaatgcctgtcagcagatttgcctgcctgtaccaggaggattgttttcctgcgcctgtgccactggatttaaactcaatcctgataatcggtcctgctctccatataactctttcattgttgtttcaatgctgtctgcaatcagaggctttagcttggaattgtcagatcattcagaaaccatggtgccggtggcaggccaaggacgaaacgcactgcatgtggatgtggatgtgtcctctggctttatttattggtgtgattttagcagctcagtggcatctgataatgcgatccgtagaattaaaccagatggatcttctctgatgaacattgtgacacatggaataggagaaaatggagtccggggtattgcagtggattgggtagcaggaaatctttatttcaccaatgcctttgtttctgaaacactgatagaagttctgcggatcaatactacttaccgccgtgttcttcttaaagtcacagtggacatgcctaggcatattgttgtagatcccaagaacagatacctcttctgggctgactatgggcagagaccaaagattgagcgttctttccttgactgtaccaatcgaacagtgcttgtgtcagagggcattgtcacaccacggggcttggcagtggaccgaagtgatggctacgtttattgggttgatgattctttagatataattgcaaggattcgtatcaatggagagaactctgaagtgattcgttatggcagtcgttacccaactccttatggcatcactgtttttgaaaattctatcatatgggtagataggaatttgaaaaagatcttccaagccagcaaggaaccagagaacacagagccacccacagtgataagagacaatatcaactggctaagagatgtgaccatctttgacaagcaagtccagccccggtcaccagcagaggtcaacaacaacccttgcttggaaaacaatggtgggtgctctcatctctgctttgctctgcctggattgcacaccccaaaatgtgactgtgcctttgggaccctgcaaagtgatggcaagaattgtgccatttcaacagaaaatttcctcatctttgccttgtctaattccttgagaagcttacacttggaccctgaaaaccatagcccacctttccaaacaataaatgtggaaagaactgtcatgtctctagactatgacagtgtaagtgatagaatctacttcacacaaaatttagcctctggagttggacagatttcctatgccaccctgtcttcagggatccatactccaactgtcattgcttcaggtatagggactgctgatggcattgcctttgactggattactagaagaatttattacagtgactacctcaaccagatgattaattccatggctgaagatgggtctaaccgcactgtgatagcccgcgttccaaaaccaagagcaattgtgttagatccctgccaagggtacctgtactgggctgactgggatacacatgccaaaatcgagagagccacattgggaggaaacttccgggtacccattgtgaacagcagtctggtcatgcccagtgggctgactctggactatgaagaggaccttctctactgggtggatgctagtctgcagaggattgaacgcagcactctgacgggcgtggatcgtgaagtcattgtcaatgcagccgttcatgcttttggcttgactctctatggccagtatatttactggactgacttgtacacacaaagaatttaccgagctaacaaatatgacgggtcaggtcagattgcaatgaccacaaatttgctctcccagcccaggggaatcaacactgttgtgaagaaccagaaacaacagtgtaacaatccttgtgaacagtttaatgggggctgcagccatatctgtgcaccaggtccaaatggtgccgagtgccagtgtccacatgagggcaactggtatttggccaacaacaggaagcactgcattgtggacaatggtgaacgatgtggtgcatcttccttcacctgctccaatgggcgctgcatctcggaagagtggaagtgtgataatgacaacgactgtggggatggcagtgatgagatggaaagtgtctgtgcacttcacacctgctcaccgacagccttcacctgtgccaatgggcgatgtgtccaatactcttaccgctgtgattactacaatgactgtggtgatggcagtgatgaggcagggtgcctgttcagggactgcaatgccaccacggagtttatgtgcaataacagaaggtgcatacctcgtgagtttatctgcaatggtgtagacaactgccatgataataacacttcagatgagaaaaattgccctgatcgcacttgccagtctggatacacaaaatgtcataattcaaatatttgtattcctcgcgtttatttgtgtgacggagacaatgactgtggagataacagtgatgaaaaccctacttattgcaccactcacacatgcagcagcagtgagttccaatgcgcatctgggcgctgtattcctcaacattggtattgtgatcaagaaacagattgttttgatgcctctgatgaacctgcctcttgtggtcactctgagcgaacatgcctagctgatgagttcaagtgtgatggtgggaggtgcatcccaagcgaatggatctgtgacggtgataatgactgtggggatatgagtgacgaggataaaaggcaccagtgtcagaatcaaaactgctcggattccgagtttctctgtgtaaatgacagacctccggacaggaggtgcattccccagtcttgggtctgtgatggcgatgtggattgtactgacggctacgatgagaatcagaattgcaccaggagaacttgctctgaaaatgaattcacctgtggttacggactgtgtatcccaaagatattcaggtgtgaccggcacaatgactgtggtgactatagcgacgagaggggctgcttataccagacttgccaacagaatcagtttacctgtcagaacgggcgctgcattagtaaaaccttcgtctgtgatgaggataatgactgtggagacggatctgatgagctgatgcacctgtgccacaccccagaacccacgtgtccacctcacgagttcaagtgtgacaatgggcgctgcatcgagatgatgaaactctgcaaccacctagatgactgtttggacaacagcgatgagaaaggctgtggcattaatgaatgccatgacccttcaatcagtggctgcgatcacaactgcacagacaccttaaccagtttctattgttcctgtcgtcctggttacaagctcatgtctgacaagcggacttgtgttgatattgatgaatgcacagagatgccttttgtctgtagccagaagtgtgagaatgtaataggctcctacatctgtaagtgtgccccaggctacctccgagaaccagatggaaagacctgccggcaaaacagtaacatcgaaccctatctcatttttagcaaccgttactatttgagaaatttaactatagatggctatttttactccctcatcttggaaggactggacaatgttgtggcattagattttgaccgagtagagaagagattgtattggattgatacacagaggcaagtcattgagagaatgtttctgaataagacaaacaaggagacaatcataaaccacagactaccagctgcagaaagtctggctgtagactgggtttccagaaagctctactggttggatgcccgcctggatggcctctttgtctctgacctcaatggtggacaccgccgcatgctggcccagcactgtgtggatgccaacaacaccttctgctttgataatcccagaggacttgcccttcaccctcaatatgggtacctctactgggcagactggggtcaccgcgcatacattgggagagtaggcatggatggaaccaacaagtctgtgataatctccaccaagttagagtggcctaatggcatcaccattgattacaccaatgatctactctactgggcagatgcccacctgggttacatagagtactctgatttggagggccaccatcgacacacggtgtatgatggggcactgcctcaccctttcgctattaccatttttgaagacactatttattggacagattggaatacaaggacagtggaaaagggaaacaaatatgatggatcaaatagacagacactggtgaacacaacacacagaccatttgacatccatgtgtaccatccatataggcagcccattgtgagcaatccctgtggtaccaacaatggtggctgttctcatctctgcctcatcaagccaggaggaaaagggttcacttgcgagtgtccagatgacttccgcacccttcaactgagtggcagcacctactgcatgcccatgtgctccagcacccagttcctgtgcgctaacaatgaaaagtgcattcctatctggtggaaatgtgatggacagaaagactgctcagatggctctgatgaactggccctttgcccgcagcgcttctgccgactgggacagttccagtgcagtgacggcaactgcaccagcccgcagactttatgcaatgctcaccaaaattgccctgatgggtctgatgaagaccgtcttctttgtgagaatcaccactgtgactccaatgaatggcagtgcgccaacaaacgttgcatcccagaatcctggcagtgtgacacatttaacgactgtgaggataactcagatgaagacagttcccactgtgccagcaggacctgccggccgggccagtttcggtgtgctaatggccgctgcatcccgcaggcctggaagtgtgatgtggataatgattgtggagaccactcggatgagcccattgaagaatgcatgagctctgcccatctctgtgacaacttcacagaattcagctgcaaaacaaattaccgctgcatcccaaagtgggccgtgtgcaatggtgtagatgactgcagggacaacagtgatgagcaaggctgtgaggagaggacatgccatcctgtgggggatttccgctgtaaaaatcaccactgcatccctcttcgttggcagtgtgatgggcaaaatgactgtggagataactcagatgaggaaaactgtgctccccgggagtgcacagagagcgagtttcgatgtgtcaatcagcagtgcattccctcgcgatggatctgtgaccattacaacgactgtggggacaactcagatgaacgggactgtgagatgaggacctgccatcctgaatattttcagtgtacaagtggacattgtgtacacagtgaactgaaatgcgatggatccgctgactgtttggatgcgtctgatgaagctgattgtcccacacgctttcctgatggtgcatactgccaggctactatgttcgaatgcaaaaaccatgtttgtatcccgccatattggaaatgtgatggcgatgatgactgtggcgatggttcagatgaagaacttcacctgtgcttggatgttccctgtaattcaccaaaccgtttccggtgtgacaacaatcgctgcatttatagtcatgaggtgtgcaatggtgtggatgactgtggagatggaactgatgagacagaggagcactgtagaaaaccgacccctaaaccttgtacagaatatgaatataagtgtggcaatgggcattgcattccacatgacaatgtgtgtgatgatgccgatgactgtggtgactggtccgatgaactgggttgcaataaaggaaaagaaagaacatgtgctgaaaatatatgcgagcaaaattgtacccaattaaatgaaggaggatttatctgctcctgtacagctgggttcgaaaccaatgtttttgacagaacctcctgtctagatatcaatgaatgtgaacaatttgggacttgtccccagcactgcagaaataccaaaggaagttatgagtgtgtctgtgctgatggcttcacgtctatgagtgaccgccctggaaaacgatgtgcagctgagggtagctctcctttgttgctactgcctgacaatgtccgaattcgaaaatataatctctcatctgagaggttctcagagtatcttcaagatgaggaatatatccaagctgttgattatgattgggatcccaaggacataggcctcagtgttgtgtattacactgtgcgaggggagggctctaggtttggtgctatcaaacgtgcctacatccccaactttgaatccggccgcaataatcttgtgcaggaagttgacctgaaactgaaatacgtaatgcagccagatggaatagcagtggactgggttggaaggcatatttactggtcagatgtcaagaataaacgcattgaggtggctaaacttgatggaaggtacagaaagtggctgatttccactgacctggaccaaccagctgctattgctgtgaatcccaaactagggcttatgttctggactgactggggaaaggaacctaaaatcgagtctgcctggatgaatggagaggaccgcaacatcctggttttcgaggaccttggttggccaactggcctttctatcgattatttgaacaatgaccgaatctactggagtgacttcaaggaggacgttattgaaaccataaaatatgatgggactgataggagagtcattgcaaaggaagcaatgaacccttacagcctggacatctttgaagaccagttatactggatatctaaggaaaagggagaagtatggaaacaaaataaatttgggcaaggaaagaaagagaaaacgctggtagtgaacccttggctcactcaagttcgaatctttcatcaactcagatacaataagtcagtgcccaacctttgcaaacagatctgcagccacctctgccttctgagacctggaggatacagctgtgcctgtccccaaggctccagctttatagaggggagcaccactgagtgtgatgcagccatcgaactgcctatcaacctgccccccccatgcaggtgcatgcacggaggaaattgctattttgatgagactgacctccccaaatgcaagtgtcctagcggctacaccggaaaatattgtgaaatggcgttttcaaaaggcatctctccaggaacaaccgcagtagctgtgctgttgacaatcctcttgatcgtcgtaattggagctctggcaattgcaggattcttccactatagaaggaccggctcccttttgcctgctctgcccaagctgccaagcttaagcagtctcgtcaagccctctgaaaatgggaatggggtgaccttcagatcaggggcagatcttaacatggatattggagtgtctggttttggacctgagactgctattgacaggtcaatggcaatgagtgaagactttgtcatggaaatggggaagcagcccataatatttgaaaacccaatgtactcagccagagacagtgctgtcaaagtggttcagccaatccaggtgactgtatctgaaaatgtggataataagaattatggaagtcccataaacccttctgagatagttccagagacaaacccaacttcaccagctgctgatggaactcaggtgacaaaatggaatctcttcaaacgaaaatctaaacaaactaccaactttgaaaatccaatctatgcacagatggagaacgagcaaaaggaaagtgttgctgcgacaccacctccatcaccttcgctccctgctaagcctaagcctccttcgagaagagacccaactccaacctattctgcaacagaagacacttttaaagacaccgcaaatcttgttaaagaagactctgaagtatagctataccagctatttagggaataattagaaacacacttttgcacatatattttttacaaacagatgaaaaaagttaacattcagtactttatgaaaaaaatatatttttccctgtttgcctataggtggaggtatcctgtgtgtctttttttacttatgccgtctcatatttttacaaataattatcacaatgtactatatgtatatctttgcactgaagttgtctgaaggtaatactataaatatattgtatatttgtaaattttggaaagattatcctgttactgaatttgctaataaagatgtctgctgaaaaaaaa

SEQ ID NO: 245 - DNA, 2601 bp, Homo sapiens
  Homo sapiens low density lipoprotein receptor-related protein 3 (LRP3), mRNA
tacgggcctgcaccgccaccgcacaaagacgcctcgggagccgccgcctgcacccgggccgcagcagccacgccagccggagcccgagccgtagcccgagcccgagcccgagccgcagccagagccagagccggagccgcagccagagccagagccggagccgcagccggaaccggagccggagccgcggggcaggaggcggcgcccgcgggcggccgggcccggcatggagaagcgcgcggccgcggggctggagggcgcgccgggcgcccgggcgcagctggccgtcgtctgtctggtgaacatctttctcaccgggagactcagcagtgcggttcctgccttagcggcctgcagtgggaagctggagcagcacacagagcggcgtggggtcatctacagcccggcctggcccctcaactacccgccaggcaccaactgcagctggtacatccagggcgaccgtggtgacatgattaccatcagcttccgcaactttgacgtggaggagtcccaccagtgctccctggactggctcctgctgggcccagcagccccaccccgccaggaggccttccgcctctgtggctccgccatcccacctgccttcatctctgcccgcgaccatgtctggattttcttccactcagacgcctccagctccggccaggcccagggcttccgtctgtcttacatccgagggaagctgggccaggcatcctgccaggcagatgagttccgctgtgacaacggcaagtgcctgcccggcccgtggcagtgcaacacggtggacgagtgtggagacggctctgatgagggcaactgctcggcgcccgcctccgagcctccaggcagcctgtgccccggggggaccttcccatgcagcggggcgcgctccacgcgttgcctgcctgtggagcggcgctgtgacggcttgcaggactgcggcgacggctcggatgaggcgggctgccccgacctggcgtgcggccggcggctgggcagcttctacggctcctttgcctccccagacctgttcggcgccgctcgcgggccctcagaccttcactgcacgtggctggtggacacacaggactcccggcgggtgctgctgcagctggaactgcggctgggctatgacgactacgtgcaggtatacgagggcctgggtgagcgcggggaccgcctgctgcagacgctgtcctaccgcagcaaccaccggcccgtgagcctggaggccgcccagggccgcctcactgtggcctaccacgcgcgcgcccgcagcgccggccacggcttcaatgccacctaccaggtgaagggctattgcctcccctgggagcagccgtgcgggagcagtagtgacagtgacgggggcagcctgggcgaccagggctgcttctcagagccacagcgctgtgatggctggtggcattgtgccagcggccgagacgagcagggctgccctgcctgcccgcccgaccagtacccctgcgagggtggcagtggtctgtgctacacgcctgccgaccgctgcaacaaccagaaaagctgtcccgacggcgccgacgagaagaactgcttctcctgccagcccggcaccttccactgcggtaccaacctgtgcatcttcgagacgtggcgctgtgacggccaggaagactgccaggacggcagcgatgagcatgggtgcctggccgccgtgccccgcaaggtcatcacggcggcgctcattggcagcctggtgtgtggcctgctgctggtcatcgcgctgggctgcgccttcaagctctactcactgcgcacgcaggaatacagggccttcgagacccagatgacgcgcctggaggctgagtttgtgcggcgggaggcacccccatcctatggtcagctcatcgcccagggcctcattccacccgtggaggactttcctgtctacagtgcgtcccaggcctctgtgctgcagaatcttcgcacagccatgcggagacagatgcgtcggcacgcctcccgccgggggccctcccgccgccgcctcggccgcctctggaaccggctctttcaccggccgcgggcgccccgaggccagatcccactgctgaccgcagcacgcccctcacagaccgtgctgggcgatggcttcctccagcctgctccaggggctgcccccgaccccccagcaccgctcatggacacaggcagcaccagggcggccggagacaggccccccagtgcccccggccgtgcaccggaggtgggaccttcagggccacccttgccctcgggcctgcgagacccagagtgcaggcccgtggacaaggacagaaaggtctgcagggagccactggcagacggcccagctcctgcagatgcacctcgggagccctgctcagcccaggacccgcacccccaggtctccactgccagcagcaccctgggcccccactcgccagagccactgggggtctgcaggaaccccccgcccccctgctccccaatgctggaggccagcgatgatgaggccctgttggtctgttgaccgctgggctcgctggtgaccgccacagccccgctttgtaaccagggaatacacagtcattt

SEQ ID NO: 246 - DNA, 4700 bp, Homo sapiens
  Homo sapiens low density lipoprotein receptor-related protein 4 (LRP4), mRNA
caggcatgaacagtttcctcatcttcgccaggaggatagacattcgcatggtctccctggacatcccttattttgctgatgtggtggtaccaatcaacattaccatgaagaacaccattgccattggagtagacccccaggaaggaaaggtgtactggtctgacagcacactgcacaggatcagtcgtgccaatctggatggctcacagcatgaggacatcatcaccacagggctacagaccacagatgggctcgcggttgatgccattggccggaaagtatactggacagacacgggaacaaaccggattgaagtgggcaacctggacgggtccatgcggaaagtgttggtgtggcagaaccttgacagtccccgggccatcgtactgtaccatgagatggggtttatgtactggacagactggggggagaatgccaagttagagcggtccggaatggatggctcagaccgcgcggtgctcatcaacaacaacctaggatggcccaatggactgactgtggacaaggccagctcccaactgctatgggccgatgcccacaccgagcgaattgaggctgctgacctgaatggtgccaatcggcatacattggtgtcaccggtgcagcacccatatggcctcaccctgctcgactcctatatctactggactgactggcagactcggagcatccaccgtgctgacaagggtactggcagcaatgtcatcctcgtgaggtccaacctgccaggcctcatggacatgcaggctgtggaccgggcacagccactaggttttaacaagtgcggctcgagaaatggcggctgctcccacctctgcttgcctcggccttctggcttctcctgtgcctgccccactggcatccagctgaagggagatgggaagacctgtgatccctctcctgagacctacctgctcttctccagccgtggctccatccggcgtatctcactggacaccagtgaccacaccgatgtgcatgtccctgttcctgagctcaacaatgtcatctccctggactatgacagcgtggatggaaaggtctattacacagatgtgttcctggatgttatcaggcgagcagacctgaacggcagcaacatggagacagtgatcgggcgagggctgaagaccactgacgggctggcagtggactgggtggccaggaacctgtactggacagacacaggtcgaaataccattgaggcgtccaggctggatggttcctgccgcaaagtactgatcaacaatagcctggatgagccccgggccattgctgttttccccaggaaggggtacctcttctggacagactggggccacattgccaagatcgaacgggcaaacttggatggttctgagcggaaggtcctcatcaacacagacctgggttggcccaatggccttaccctggactatgatacccgcaggatctactgggtggatgcgcatctggaccggatcgagagtgctgacctcaatgggaaactgcggcaggtcttggtcagccatgtgtcccacccctttgccctcacacagcaagacaggtggatctactggacagactggcagaccaagtcaatccagcgtgttgacaaatactcaggccggaacaaggagacagtgctggcaaatgtggaaggactcatggatatcatcgtggtttcccctcagcggcagacagggaccaatgcctgtggtgtgaacaatggtggctgcacccacctctgctttgccagagcctcggacttcgtatgtgcctgtcctgacgaacctgatagccggccctgctcccttgtgcctggcctggtaccaccagctcctagggctactggcatgagtgaaaagagcccagtgctacccaacacaccacctaccaccttgtattcttcaaccacccggacccgcacgtctctggaggaggtggaaggaagatgctctgaaagggatgccaggctgggcctctgtgcacgttccaatgacgctgttcctgctgctccaggggaaggacttcatatcagctacgccattggtggactcctcagtattctgctgattttggtggtgattgcagctttgatgctgtacagacacaaaaaatccaagttcactgatcctggaatggggaacctcacctacagcaacccctcctaccgaacatccacacaggaagtgaagattgaagcaatccccaaaccagccatgtacaaccagctgtgctataagaaagagggagggcctgaccataactacaccaaggagaagatcaagatcgtagagggaatctgcctcctgtctggggatgatgctgagtgggatgacctcaagcaactgcgaagctcacgggggggcctcctccgggatcatgtatgcatgaagacagacacggtgtccatccaggccagctctggctccctggatgacacagagacggagcagctgttacaggaagagcagtctgagtgtagcagcgtccatactgcagccactccagaaagacgaggctctctgccagacacgggctggaaacatgaacgcaagctctcctcagagagccaggtctaaatgcccacattctcttccctgcctgcctgttccttctcctttatggacgtctagtccttgtgctcgcttacaccgcaggccccgcttctgtgtgcttgtcctcctcctcctcccaccccataactgttcctaagccttcaccggagctgtttaccacgtgagtccataactacctgtgcacaagaaatgatggcacatcacgagaatttagacctggattttaccatgaacctcacatcttgtactccatcctgggccccctgaaactgcttattcgtgattcctcaccagcgtagagctccacctcccctttccccagtaccctcagtgcctgcttctcagtgctgatgcagctgatgacccaggactgcgctctgccccatcacagccagcatgactgcttctctgagagaacttgcccatcaggggctgggacatgggggtgtgggtaaagacagggatgaaggatagaggctgagagaagaaggaagaatcagcccagcaggtatgggcatctgggaaacctccagcctcaagtgtgttagtaacatgaaaaagctttggggggtagttggatctgggtgtctggtccattgctggcagtggacattattcttgccctaagagacactgccttttcagcagcagatactggtgagatgggggtggctcaggctgttcttcctcctcctagaatgtctggagctgtttctacattcagataactgggtcccctatcacaaggctactggctaataggaattccctcctggtgccaccactggccagtacctttcctaagtctttgctcaaattaaccaggttgtgagccagtggcttgagtgaatgttaggccttgggggctgagtctctgaaaagtctaagaagctctgcctagaccaaatatggtatacctcctgacccctctctccctcatgtcctgggattctggggaagagacctagaaacaagctttcaaagaaaaaccagaagttgtcataaatggtcagaaagaacgatcaggttggagacttgggaaacccagggcctaaagagaagtatccatgagggtcaaacttcctgttgaacttcctatgttctttctcaagtgctcagggatctaagttagtggacagcaagcctgtggctacggggtggtgatgttcctcttccagctgtcccctcagctaaggggcttagtttccatgtgggatgccatcacttggttcatgctcattcacacaaagggcacgtgtctcagcctggtatcagggaaattgagacttatttttgccctaaaacgtctccctagctgttcttcgtggggtttttttgtttgtttttttgcctaatttgctttttctgaccaagccttgtggcaccagcaatctccaaagtcctgtggtgggagggctgaataaataaaaatacaaagaggtgggtaaggagtaggaaggtagagagcaccactgatgaggccctcctagcccatggcagacccagacctcttctcccccaggaattagaagtggcaggagagaacaacaggggctgggaatggaggggagaatttctaggggaagtttcctgagttgaaacttctcctgtggttactggtattgagaaatcagctaccaaagtgaaaaaggacaagatcaattcttttctagtcagttctaagactgctagagagagataccaggcccttagccttgctctcagtagcgtcagccccagttctgagcctccccacattacacttaacaagcagtaaaggagtgagcactttgggtccttagactcacgtctggggaggaagagcaagtagaaaagtggcattttcttgattggaaagggggaaggatcttattgcacttgggctgttcagaatgtagaaaggacatatttgaggaagtatctatttgagcactgatttactctgtaaaaagcaaaatctctctgtcctaaactaatggaagcgattctcccatgctcatgtgtaatggttttaacgttactcactggagagattggactttctggagttatttaaccactatgttcagtattttaggactttatgataatttaatataaatttagcttttcttaatc

1. A method for diagnosing osteoporosis in a patient, wherein said method comprises:
a) obtaining a biological sample from said patient, and
b) analyzing the gene expression of at least one of SEQ ID NOS. 1-150, SEQ ID NOS. 151, 1522 or 153, SEQ ID NOS. 154-196, SEQ ID NOS. 197-210, SEQ ID NOS. 211-229, SEQ ID NOS. 230-234, or SEQ ID NOS. 235-245 from said sample,
c) detecting optionally-amplified cDNA contained in said sample to diagnose osteoporosis in said patient.

2. The method of claim 1, wherein said gene expression analysis comprises:
a) making complementary DNA (cDNA) from messenger RNA (mRNA) contained in said sample,
b) optionally amplifying portions of said cDNA corresponding to at least one of SEQ ID NOS. 1-150, SEQ ID NOS. 151, 1522 or 153, SEQ ID NOS. 154-196, SEQ ID NOS. 197-210, SEQ ID NOS. 211-229 SEQ ID NOS. 230-234, or SEQ ID NOS. 235-245, and
c) detecting said optionally amplified cDNA, to diagnose osteoporosis.

3. The method of claim 1, wherein said gene expression analysis is performed by using a DNA chip.

4. The method of claim 1, wherein said sample is from a tissue from said patient.

5. The method of claim 1, wherein a labeled specific oligonucleotide primer or probe is used to detect of said cDNA.

6. The method of claim 1, wherein said amplified cDNA is size-separated by electrophoresis prior to detection.

7. The method of claim 6, wherein blotting and autoradiography are performed on said size-separated cDNA.

8. The method of claim 1, wherein said gene expression analysis is performed by analyzing mRNA obtained from cells of said sample.

9. A method for diagnosing osteoporosis in a mammal comprising:
a) contacting a sample of mammalian bone or cartilaginous tissue with an agent for specifically detecting endogenous expression of one of SEQ ID NOS. 1-150, SEQ ID NOS. 151, 152, or 153, SEQ ID NOS. 154-196, SEQ ID NOS. 197-210, SEQ ID NOS. 211-229, SEQ ID NOS. 230-234, or SEQ ID NOS. 235-245 in said tissue sample;
b) detecting a level of endogenous expression of said gene in said tissue; and
c) comparing said level of endogenously expressed gene represented by one of SEQ ID NOS. 1-150, SEQ ID NOS. 151, 1522 or 153, SEQ ID NOS. 154-196, SEQ ID NOS. 197-210, SEQ ID NOS. 211-229, SEQ ID NOS. 230-234, SEQ ID NOS. 235-245 in said tissue with a reference level of said gene represented by one of SEQ ID NOS. 1-150, SEQ ID NOS. 151, 152, or 153, SEQ ID NOS. 154-196, SEQ ID NOS. 197-210, SEQ ID NOS. 211-229, SEQ ID NOS. 230-234, or SEQ ID NOS. 235-245, endogenously expressed in undiseased mammalian bone or cartilaginous tissue to diagnose osteoporosis in said mammal.

10. The method of claim 9, wherein said agent is a nucleic acid probe that hybridizes specifically with RNA transcribed from said gene chosen from SEQ ID NOS. 1-150, SEQ ID NOS. 151, 1524 or 153, SEQ ID NOS. 154-196, SEQ ID NOS. 197-210, SEQ ID NOS. 211-229, SEQ ID NOS. 230-234, or SEQ ID NOS. 235-245, present in cells of said tissue, or with cDNA obtainable from said RNA.

11. The method of claim 9, wherein said agent is a monoclonal or polyclonal antibody that specifically recognizes the protein encoded by said gene chosen from SEQ ID NOS. 1-150, SEQ ID NOS. 151, 152, or 153, SEQ ID NOS. 154-196, SEQ ID NOS. 197-210, SEQ ID NOS. 211-229, SEQ ID NOS. 230-234, or SEQ ID NOS. 235-245.

12. The method of claim 9, further comprising:
d) contacting a sample of said mammalian bone or cartilaginous tissue with a control nucleic acid probe that hybridizes specifically with RNA transcribed from a gene expressed uniformly in mammalian tissues;
e) detecting a level of expression of said gene in said tissue; and
f) comparing the relative gene expression levels of said gene represented by one of SEQ ID NOS. 1-150, SEQ ID NOS. 151, 152, or 153, SEQ ID NOS. 154-2196, SEQ ID NOS. 197-210, SEQ ID NOS. 211-229, SEQ ID NOS. 230-234, or SEQ ID NOS. 235-245 and said gene in said tissue, with the relative gene expression levels of said gene represented by one of SEQ ID NOS. 150, or SEQ ID NOS. 151, 152, or 153, SEQ ID NOS. 154-196, SEQ ID NOS. 197-210, SEQ ID NOS. 211-229, SEQ ID NOS. 230-234, or SEQ ID NOS. 235-2452 and said gene in undamaged or undiseased mammalian bone or cartilaginous tissue.

13. A method for promoting osteogenesis and/or preventing osteoporosis comprising administering to a subject in need thereof a therapeutically effective amount of a protein product encoded by one of SEQ ID NOS. 1-150, SEQ ID NOS. 151, 1522 or 153, or SEQ ID NOS. 154-196, SEQ ID NOS. 197-210, SEQ ID NOS. 211-229, SEQ ID NOS. 230-234, or SEQ ID NOS. 235-245, wherein said protein product promotes osteogenesis and/or prevents osteoporosis.

14. A method for promoting osteogenesis and/or preventing osteoporosis comprising administering to a subject in need thereof a therapeutically effective amount of a nucleic acid comprising one of SEQ ID NOS. 1-150, SEQ ID NOS. 151, 1524 or 153, SEQ ID NOS. 154-196, SEQ ID NOS. 197-210, SEQ ID NOS. 211-229, SEQ ID J NOS. 230-234, or SEQ ID NOS. 235 te SEQ ID N⁰-245, wherein said nucleic acid product promotes osteogenesis and/or prevents osteoporosis.

15. The method of claim 14, wherein said nucleic acid is administered to said subject and wherein said nucleic acid enters said subject's osteoblastic or osteoclastic cells.

16. The method of claim 15, wherein said nucleic acid is introduced into said cells by means of a viral vector.

17. The method of claim 15, wherein said nucleic acid is introduced into said cells by means of a synthetic vector.

18. A method for promoting osteogenesis and/or preventing osteoporosis comprising administering to a subject in need thereof a therapeutically effective amount of an inhibitor of a protein product encoded by one of SEQ ID 1 NOS. 1-150, SEQ ID NOS. 151, 1524 or 153, SEQ ID NOS. 154-196, SEQ ID NOS. 197-210, SEQ ID NOS. 211-229, SEQ ID NOS. 230-234, or SEQ ID NOS. 235-245.

19. The method of claim 18, wherein said inhibitor is a monoclonal or polyclonal antibody directed towards said protein product encoded by one of SEQ ID NOS. 1-105.

20. The method of claim 19, wherein said inhibitor is a nucleic acid, and wherein said inhibitor is antisense to the nucleic acid represented by one of SEQ ID NOS. 1-150.

21. A method for identifying a compound having a role in osteogenesis, comprising the steps of:
a) contacting said compound with a cell model of osteogenesis, and
b) comparing the level of gene expression of one of SEQ ID NOS. 1-150, SEQ ID NOS. 151, 1522 or 153, SEQ ID NOS. 154-196, SEQ ID NOS. 197-210, SEQ ID NOS. 211-229, SEQ ID NOS. 230-234, or SEQ ID NOS. 235-245 in said cell model with the level of gene expression of said gene in said cell model to which said compound has not been brought in contact, wherein the role of said compound in said osteogenesis being is deduced from the difference between said levels of gene expression.

22. A method for identifying a compound useful for modulation of osteogenesis, comprising:
a) contacting said compound with a protein encoded by one of SEQ ID NOS. 1-150, SEQ ID NOS. 151, 152, or 153, SEQ ID NOS. 154-196, SEQ ID NOS. 197-210, SEQ ID NOS. 211-229, SEQ ID NOS. 230 to SEQ ID N2-234, or SEQ ID NOS. 235-245, and
b) analyzing the interaction between said compound and said protein, wherein the utility of said compound in the modulation of osteogenesis is deduced from the presence of the interaction between said compound and said protein encoded by one of SEQ ID NOS. 1-150.

23. A method for identifying a compound useful for treatment of osteoporosis, comprising:
a) performing the method of claim 21,
b) modifying the compound selected in step a),
c) testing the modified compound of step b) in in vitro and/or in vivo models relevant for assessment of osteoporosis,
d) identifying the compound having an anti-osteoporosis activity superior to the compound selected in step a).

24. A method for identifying a compound useful for treatment of osteoporosis, comprising:
a) performing the method of claim 21,
b) modifying the compound selected in step a),
c) testing the modified compound of step b) in in vitro and/or in vivo models relevant for assessment of osteoporosis,
d) identifying the compound having the searched biological effect on osteoporosis, with a reduced toxicity in an animal model than the compound selected in step a).

25. A compound identified by the method of claim 21.

26. An isolated nucleic acid sequence, wherein said nucleic acid sequence is upregulated during osteogenesis, and wherein said nucleic acid sequence is chosen from the group consisting of:
a) one of SEQ ID NOS. 1-9, SEQ ID NOS. 11-20, SEQ ID NO. 27, SEQ ID NOS. 33-36, SEQ ID NOS. 45-50, SEQ ID NO. 53, SEQ ID NO. 54, SEQ ID NOS. 58-62, SEQ ID NO. 66, SEQ ID NOS. 69-75, SEQ ID NOS. 76-84, SEQ ID NOS. 86-95, SEQ ID NO. 102, SEQ ID NOS. 108-111, SEQ ID NOS. 120-125, SEQ ID NO. 128, SEQ ID NO. 129, SEQ ID NOS. 133-137, SEQ ID NO. 141, SEQ ID NOS. 144-150, SEQ ID NO. 156, SEQ ID NOS. 158-161, SEQ ID NOS. 164-167, SEQ ID NOS. 170-174, SEQ ID NO. 176, SEQ ID NO. 177, SEQ ID NO. 178, SEQ ID NOS. 180-185, SEQ ID NO. 187, SEQ ID NOS. 191-194, or SEQ ID NO. 196
b) an isolated and purified nucleic acid comprising the nucleic acid sequence of a)
c) an isolated nucleic acid that specifically hybridizes under stringent conditions to the complement of the nucleic acid sequence of a), wherein said nucleic acid sequence encodes a protein that is upregulated during osteogenesis
d) an isolated nucleic acid having at least 80% homology with the nucleic acid sequence of a), wherein said nucleic acid sequence encodes a protein that is upregulated during osteogenesis
e) a fragment of said nucleic acid sequence of a) comprising at least 15 nucleotides.

27. An isolated nucleic acid sequences wherein said nucleic acid sequence is downregulated during osteogenesis, and wherein said nucleic acid sequence is chosen from the group consisting of:
a) one of SEQ ID NO. 10, SEQ ID NOS. 211-726, SEQ ID NOS. 28-32, SEQ ID NOS. 37-44, SEQ ID NO. 51, SEQ ID NO. 52, SEQ ID NOS. 55-57, SEQ ID NOS. 63-65, SEQ ID NO. 67, SEQ ID NO. 68, SEQ ID NO. 85, SEQ ID NOS. 96-101, SEQ ID NOS. 103-107, SEQ ID NOS. 112-119, SEQ ID NO. 126, SEQ ID NO. 127, SEQ ID NOS. 130-132; SEQ ID NOS. 138-140, SEQ ID NO. 142, SEQ ID NO. 143, SEQ ID NO. 154, SEQ ID NO. 155, SEQ ID NO. 157, SEQ ID NO. 162, SEQ ID NO. 163, SEQ ID NO. 168, SEQ ID NO. 196, SEQ ID NO. 175, SEQ ID NO. 176, SEQ ID NO. 179, SEQ ID NO. 186, SEQ ID NO. 188, SEQ ID NO. 189, SEQ ID NO. 190, or SEQ ID NO. 195
b) an isolated and purified nucleic acid comprising the nucleic acid sequence of a)
c) an isolated nucleic acid that specifically hybridizes under stringent conditions to the complement of the nucleic acid sequence of a), wherein said nucleic acid sequence encodes a protein that is upregulated during osteogenesis
d) an isolated nucleic acid having at least 80% homology with the nucleic acid sequence of a), wherein said nucleic acid sequence encodes a protein that is upregulated during osteogenesis
e) a fragment of the nucleic acid sequence of a) comprising at least 15 nucleotides.

28. An isolated protein or peptide encoded by the nucleic acid sequence of claim 26.

29. A monoclonal or polyclonal antibody that specifically recognizes the protein or peptide of claim 28.

30. A pharmaceutical composition comprising the compound of claim 25 and a pharmaceutically acceptable excipient.

31. A method for the therapy of a bone disease, comprising administering to a subject in need thereof the compound of claim 25.

32. A DNA chip that harbors at least one probe that hybridizes to one of SEQ ID NOS. 1-150.

33. A transgenic non-human mammal having integrated into its genome the nucleic acid sequence of claim 26, operatively linked to regulatory elements, wherein expression of said coding sequence increases the level of said nucleic acid sequence's related protein, and wherein said non-human mammal exhibits a difference in bone formation and/or regeneration compared to a non-transgenic mammal of the same species.

34. A transgenic non-human mammal whose genome comprises a disruption of the nucleic acid of claim 26, wherein said disruption comprises the insertion of a selectable marker sequence, and wherein said disruption results in said non-human mammal exhibiting a difference in bone formation and/or regeneration and/or regulation compared to a non-transgenic mammal of the same species.

35. The transgenic mammal of claim 34, wherein said disruption is a homozygous disruption.

36. The transgenic mammal of claim 35, wherein said homozygous disruption results in a null mutation of the nucleic acid sequence.

37. The mammal of claim 33 wherein said mammal is a mouse.

38. The method of claim 4, wherein said tissue is from a bone, cartilaginous tissue, blood, or bodily fluid.

39. The method of claim 5, wherein said probe is contained on the surface of a DNA chip.

40. The method of claim 39, wherein said DNA chip contains sequences to which said cDNA may hybridize under stringent conditions.

41. A method for identifying a compound useful for treatment of osteoporosis, comprising:
a) performing the method of claim 22,
b) modifying the compound selected in step a),
c) testing the modified compound of step b) in in vitro and/or in vivo models relevant for assessment of osteoporosis,
d) identifying the compound having an anti-osteoporosis activity superior to the compound selected in step a).

42. A method for identifying a compound useful for treatment of osteoporosis, comprising:
a) performing the method of claim 22,
b) modifying the compound selected in step a),
c) testing the modified compound of step b) in in vitro and/or in vivo models relevant for assessment of osteoporosis,
d) identifying the compound having the searched biological effect on osteoporosis, with a reduced toxicity in an animal model than the compound selected in step a).

43. A compound identified by the method of claim 22.

44. A compound identified by the method of claim 23.

45. A compound identified by the method of claim 24.

46. A compound identified by the method of claim 41.

47. A compound identified by the method of claim 42.

48. An isolated protein or peptide encoded by the nucleic acid sequence of claim 27.

49. A monoclonal or polyclonal antibody that specifically recognizes the protein or peptide of claim 48.

50. A pharmaceutical composition comprising the nucleic acid of claim 26 and a pharmaceutically acceptable excipient.

51. A pharmaceutical composition comprising the nucleic acid of claim 27 and a pharmaceutically acceptable excipient.

52. A pharmaceutical composition comprising the protein of claim 28 and a pharmaceutically acceptable excipient.

53. A pharmaceutical composition comprising the antibody of claim 29 and a pharmaceutically acceptable excipient.

54. A method for the therapy of a bone disease, comprising administering to a subject in need thereof the nucleic acid of claim 26.

55. A method for the therapy of a bone disease, comprising administering to a subject in need thereof the nucleic acid of claim 27.

56. A method for the therapy of a bone disease, comprising administering to a subject in need thereof the protein of claim 28.

57. A method for the therapy of a bone disease, comprising administering to a subject in need thereof the antibody of claim 29.

58. A method for the therapy of a bone disease, comprising administering to a subject in need thereof the pharmaceutical composition of claim 30.

59. A transgenic non-human mammal having integrated into its genome the nucleic acid sequence of claim 27, operatively linked to regulatory elements, wherein expression of said coding sequence increases the level of said nucleic acid sequence's related protein, and wherein said non-human mammal exhibits a difference in bone formation and/or regeneration compared to a non-transgenic mammal of the same species.

60. A transgenic non-human mammal whose genome comprises a disruption of the nucleic acid of claim 27, wherein said disruption comprises the insertion of a selectable marker sequence, and wherein said disruption results in said nonhuman mammal exhibiting a difference in bone formation and/or regeneration and/or regulation compared to a non-transgenic mammal of the same species.

61. The transgenic mammal of claim 60, wherein said disruption is a homozygous disruption.

62. The transgenic mammal of claim 61, wherein said homozygous disruption results in a null mutation of the nucleic acid sequence.

63. The transgenic mammal of claim 36, wherein said nucleic acid sequence comprises the nucleic acid sequence of claim 26.

64. The transgenic mammal of claim 36, wherein said nucleic acid sequence comprises the nucleic acid sequence of claim 27.

65. The transgenic mammal of claim 62, wherein said nucleic acid sequence comprises the nucleic acid sequence of claim 26.

66. The transgenic mammal of claim 62, wherein said nucleic acid sequence comprises the nucleic acid sequence of claim 27.

67. The mammal of claim 34, wherein said mammal is a mouse.

68. The mammal of claim 59, wherein said mammal is a mouse.

69. The mammal of claim 60, wherein said mammal is a mouse.
